(19) United States
(12) Patent Application Publication
(10) Pub. No.: US 2024/0025993 A1
(43) Pub. Date: Jan. 25, 2024

(54) CD19 BINDING MOLECULES AND USES THEREOF

(71) Applicant: NOVARTIS AG, Basel (CH)

(72) Inventors: Regis CEBE, Saint-Louis (FR); Dattananda CHELUR, Chesterbrook, PA (US); Brian Walter GRANDA, Salisbury, MA (US); Connie WONG, Somerville, MA (US); Sunyoung JANG, Cambridge, MA (US); Haihui LU, Winchester, MA (US); Amy RAYO, Cambridge, MA (US); Darko SKEGRO, Riehen (CH)

(21) Appl. No.: 18/035,470

(22) PCT Filed: Nov. 4, 2021
(86) PCT No.: PCT/IB2021/060213

§ 371 Date: May 4, 2023

Related U.S. Application Data
(60) Provisional application No. 63/110,490, filed on Nov. 6, 2020.
(60) Provisional application No. 63/110,501, filed on Nov. 6, 2020.
(60) Provisional application No. 63/114,371, filed on Nov. 16, 2020.
(60) Provisional application No. 63/147,501, filed on Feb. 9, 2021.

(51) Int. Cl. C07K 16/28; A61P 35/00

(52) U.S. Cl. CPC C07K 16/2803; A61P 35/00; C07K 2317/565; C07K 2317/52; C07K 2317/31; C07K 2317/35; C07K 2317/622; C07K 2317/55

(57) ABSTRACT

The present disclosure provides CD19 binding molecules that specifically bind to CD19, including monospecific, bispecific and trispecific binding molecules, conjugates comprising the CD19 binding molecules, and pharmaceutical compositions comprising the CD19 binding molecules and the conjugates. The disclosure further provides methods of using the C19 binding molecules to treat diseases and disorders associated with expression of CD19. The disclosure yet further provides recombinant host cells engineered to express the CD19 binding molecules and methods of producing the CD19 binding molecules by culturing the host cells under conditions in which the CD19 binding molecules are expressed.

### 1. CROSS-REFERENCE TO RELATED APPLICATIONS

[0001] This application claims the priority benefit of U.S. provisional application nos. 63/110,501, filed Nov. 6, 2020, 63/114,371, filed Nov. 16, 2020, 63/147,501, filed Feb. 9, 2021 and 63/110,490 filed Nov. 6, 2020, the contents of each of which are incorporated herein in their entireties by reference thereto.

### 2. SEQUENCE LISTING

[0002] The instant application contains a Sequence Listing which has been submitted electronically in ASCII format and is hereby incorporated by reference in its entirety. Said ASCII copy, created on Nov. 3, 2021, is named NOV-014WO_SL.txt and is 768,034 bytes in size.

### 3. FIELD OF INVENTION

[0003] The disclosure generally relates to CD19 binding molecules that specifically bind to CD19, including monospecific, bispecific and trispecific binding molecules, and their use for treating diseases and disorders associated with expression of CD19.

### 4. BACKGROUND

[0004] B cells express a wide array of cell surface molecules during their differentiation and proliferation. CD19 is a pan-B cell membrane glycoprotein that is expressed from early stages of pre-B cell development through terminal differentiation, regulating B lymphocyte development and function. Expression of CD19 was identified on most cancers of lymphoid origin, on the vast majority of Non-Hodgkin lymphoma (NHL) and on leukemias, including Chronic Lymphocytic Leukemia (CLL), Acute Lymphoblastic Leukemia (ALL) and Waldenstrom's Macroglobulinemia (WM).

[0005] Blinatumomab, a CD19-CD3 bispecific T cell engager, is approved for the treatment of the treatment of ALL. However, treatment with blinatumomab lacks a durable response and is characterized by a high relapse rate. Von Stackelberg et al., 2016, Journal of Clinical Oncology 34(36):4381-4389. Moreover, blinatumomab has a short half-life, which requires continuous exposure for the drug to exert sufficient efficacy and manageable toxicity. Porter et al., 2013, Clin Pharmacol. 5(Suppl 1): 5-11.

[0006] Despite major improvements in cancer therapy, B cell malignancies, such as the B cell subtypes of non-Hodgkin's lymphomas, and chronic lymphocytic leukemia, are major contributors of cancer-related deaths. Accordingly, there is still a need for further therapeutic agents for the treatment of B cell malignancies.

### 5. SUMMARY

[0007] The disclosure provides CD19 binding molecules that specifically bind to human CD19, e.g., antibodies, antigen-binding fragments thereof, and multispecific molecules that specifically bind to human CD19. The CD19 binding molecules of the disclosure typically comprise a Fc domain comprising a first variant human IgG1 Fc region and a second variant human IgG1 Fc region having L234A, L235A, and G237A (“LALAGA”) substitutions, L234A, L235A, S267K, and P329A (“LALASKPA”) substitutions, D265A, P329A, and S267K (“DAPASK”) substitutions, G237A, D265A, and P329A (“GADAPA”) substitutions, G237A, D265A, P329A, and S267K (“GADAPASK”) substitutions, L234A, L235A, and P329G (“LALAPG”) substitutions, or L234A, L235A, and P329A (“LALAPA”) substitutions.

[0008] In one aspect, the disclosure provides monospecific CD19 binding molecules (e.g., antibodies and antigen-binding fragments thereof) comprising a CD19 antigen-binding domain or antigen-binding module (“ABM”). Exemplary CD19 binding molecules, which can be monospecific, are described in Section 7.2 and specific embodiments 1 to 15, infra.

[0009] In another aspect, the disclosure provides multispecific binding molecules (“MBMs”) comprising the CD19 ABMs of the disclosure.

[0010] In certain embodiments, the MBMs are bispecific binding molecules (“BBMs”). The BBMs of the disclosure comprise a first ABM that specifically binds to human CD19 (“ABM1” or “CD19 ABM”) and a second ABM that specifically binds to a second antigen (“ABM2”), e.g., human CD3 or other component of a T cell receptor (TCR) complex (sometimes referred to herein as a “TCR ABM”). The terms ABM1, ABM2, CD19 ABM, and TCR ABM are used merely for convenience and are not intended to convey any particular configuration of a BBM. In some embodiments, a TCR ABM binds to CD3 (referred to herein a “CD3 ABM” or the like). Accordingly, disclosures relating to ABM2 and TCR ABMs are also applicable to CD3 ABMs. Such multispecific molecules can be used to direct CD3+ effector T cells to CD19+ sites, thereby allowing the CD3+ effector T cells to attack and lyse the CD19+ cells and tumors. Features of exemplary MBMs are described in Sections 7.5 to 7.6 and specific embodiments 16 to 783, infra.

[0011] The present disclosure also extends the principles of redirected targeted T-cell lysis (RTCC) by providing trispecific binding molecules (“TBMs”) that engage CD19, CD3 or other component of a TCR complex on T-cells, and either CD2 or a human tumor-associated antigen (“TAA”), for example a B cell antigen other than CD19. The TBMs of the disclosure comprise at least three antigen-binding modules (“ABMs”) that can bind (i) CD19 (ABM1), (ii) a component of a TCR complex (ABM2), and (iii) either CD2 or a TAA (ABM3). TBMs that bind to (1) human CD19, (2) CD3 or other component of a TCR complex, and (3) CD2 are referred to herein as “Type 1 TBMs” for convenience. TBMs that bind to (1) human CD19, (2) CD3 or other component of a TCR complex, and (3) a TAA are referred to herein as “Type 2 TBMs” for convenience.

[0012] Without being bound by theory, the inventors believe that combining CD2- and TCR complex-engagement in a Type 1 TBM can stimulate both a primary signaling pathway that promotes T-cell mediated lysis of tumor cells (by clustering TCRs, for example) and a second co-stimulatory pathway to induce T-cell proliferation and potentially overcome anergy. Also without being bound by theory, it is believed that engaging a TAA in addition to CD19 and a component of a TCR complex a Type 2 TBM will improve the clinical outcomes of RTCC therapy of cancer, e.g., B cell malignancies, by targeting a greater number of cancerous B cells than using bispecific engagers that target only a CD19 and a TCR complex component.

[0013] Accordingly, in one aspect, the present disclosure provides Type 1 TBMs that bind to (1) human CD19, (2) CD3 or other component of a TCR complex, and (3) CD2.

[0014] In another aspect, the present disclosure provides Type 2 TBMs that bind to (1) human CD19, (2) CD3 or other component of a TCR complex, and (3) a TAA.

[0015] Unless expressly indicated otherwise or unless the context dictates otherwise, a reference to TBMs in the present disclosure applies to both Type 1 and Type 2 TBMs.

[0016] In some embodiments, each antigen-binding module of a MBM of the disclosure is capable of binding its respective target at the same time as each of the one or more additional antigen-binding modules is bound to its respective target. ABM1 is immunoglobulin based, while ABM2 and, when present, ABM3 can be immunoglobulin- or non-immunoglobulin-based. Therefore the MBMs can include immunoglobulin-based ABMs or any combination of immunoglobulin- and non-immunoglobulin-based ABMs. Immunoglobulin-based ABMs that can be used in the MBMs are described in Section 7.3.1 and specific embodiments 17 to 21, 24 to 29, infra. Non-immunoglobulin-based ABMs that can be used in the MBMs are described in Section 7.3.2 and specific embodiments 22 to 23, infra. Further features of exemplary ABMs that bind to human CD19 are described in Section 7.2 and specific embodiments 17 to 21, infra. Further features of exemplary ABMs that bind to a component of a TCR complex are described in Section 7.7 and specific embodiments 30 to 223, infra. Further features of exemplary ABMs that bind to CD2 are described in Section 7.8 and specific embodiments 325 to 374, infra. Further features of exemplary ABMs that bind to TAAs are described in Section 7.9 and specific embodiments 375 to 493, infra.

[0017] The ABMs of a MBM (or portions thereof) can be connected to each other, for example, by short peptide linkers or by an Fc domain. Methods and components for connecting ABMs to form a MBM are described in Section 7.4 and specific embodiments 497 to 770, infra.

[0018] BBMs have at least two ABMs (e.g., a BBM is at least bivalent) and TBMs have at least three ABMs (e.g., a TBM is at least trivalent), but they can have greater valencies. For example, a BBM can have three, four or more ABMs (i.e., is trivalent, tetravalent, or has a valency that is greater than tetravalent). Exemplary bivalent, trivalent, and tetravalent BBM configurations are shown in FIG. 1 and described in Section 7.5 and specific embodiments 226 to 286, infra.

[0019] A TBM can have four ABMs (i.e., is tetravalent), five ABMs (i.e., is pentavalent), or six ABMs (i.e., is hexavalent), provided that the TBM has at least one ABM that can bind CD19, at least one ABM that can bind a component of a TCR complex, and at least one ABM that can bind either CD2 or a TAA. Exemplary trivalent, tetravalent, pentavalent, and hexavalent TBM configurations are shown in FIG. 2 and described in Section 7.6 and specific embodiments 289 to 323, infra.

[0020] The disclosure further provides nucleic acids encoding the CD19 binding molecules (either in a single nucleic acid or a plurality of nucleic acids) and recombinant host cells and cell lines engineered to express the nucleic acids and CD19 binding molecules of the disclosure. Exemplary nucleic acids, host cells, and cell lines are described in Section 7.10 and specific embodiments 885 to 892, infra.

[0021] The present disclosure further provides drug conjugates comprising the CD19 binding molecules of the disclosure. Such conjugates are referred to herein as “antibody-drug conjugates” or “ADCs” for convenience, notwithstanding that some of the ABMs can be non-immunoglobulin domains. Examples of ADCs are described in Section 7.12 and specific embodiments 784 to 822, infra. Pharmaceutical compositions comprising the CD19 binding molecules are also provided. Examples of pharmaceutical compositions are described in Section 7.15 and specific embodiment 823, infra.

[0022] Further provided herein are methods of using the CD19 binding molecules, the ADCs, and the pharmaceutical compositions of the disclosure, for example for treating proliferative conditions (e.g., cancers), on which CD19 is expressed, for treating autoimmune disorders, and for treating other diseases and conditions associated with expression of CD19. In some embodiments, the cancer is B cell malignancy (e.g., a NHL such as DLBCL or MCL). In some embodiments, the CD19 binding molecules, the ADCs, and the pharmaceutical compositions of the disclosure are administered to a subject who has a NHL, for example DLBCL or MCL, and (i) has failed at least one prior line (and optionally up to five prior lines) of standard of care therapy, e.g., an anti-CD20 therapy such as rituximab and/or (ii) is intolerant to or ineligible for one or more other approved therapies, e.g., autologous stem cell transplant (ASCT) and/or (iii) is a non-responder to a chimeric antigen receptor (CAR) T cell therapy. The NHL can be relapsed and/or refractory. Further exemplary methods are described in Section 7.16 and specific embodiments 824 to 881, infra.

[0023] The disclosure further provides methods of using the CD19 binding molecules, the ADCs, and the pharmaceutical compositions in combination with other agents and therapies. Exemplary agents, therapies, and methods of combination therapy are described in Section 7.17 and specific embodiment 881, infra.

[0024] Provided herein is a CD19 binding molecule that specifically binds to human CD19 and comprises (a) CDR-H1, CDR-H2, and CDR-H3 having the amino acid sequences of SEQ ID NO:1, SEQ ID NO:2, and SEQ ID NO:3, and CDR-L1, CDR-L2, and CDR-L3 having the amino acid sequences of SEQ ID NO:14, SEQ ID NO:15, and SEQ ID NO:16; and (b) a first variant human IgG1 Fc region and a second variant human IgG1 Fc region forming a Fc domain, wherein the first and second variant Fc regions comprise L234A, L235A, and G237A (“LALAGA”) substitutions, L234A, L235A, S267K, and P329A (“LALASKPA”) substitutions, D265A, P329A, and S267K (“DAPASK”) substitutions, G237A, D265A, and P329A (“GADAPA”) substitutions, G237A, D265A, P329A, and S267K (“GADAPASK”) substitutions, L234A, L235A, and P329G (“LALAPG”) substitutions, or L234A, L235A, and P329A (“LALAPA”) substitutions, wherein the amino acid residues are numbered according to the EU numbering system.

[0025] Provided herein is a CD19 binding molecule that specifically binds to human CD19 and comprises (a) CDR-H1, CDR-H2, and CDR-H3 having the amino acid sequences of SEQ ID NO:4, SEQ ID NO:5, and SEQ ID NO:6, and CDR-L1, CDR-L2, and CDR-L3 having the amino acid sequences of SEQ ID NO:17, SEQ ID NO:18, and SEQ ID NO:19; and (b) a first variant human IgG1 Fc region and a second variant human IgG1 Fc region forming a Fc domain, wherein the first and second variant Fc regions comprise L234A, L235A, and G237A (“LALAGA”) substitutions, L234A, L235A, S267K, and P329A (“LALASKPA”) substitutions, D265A, P329A, and S267K (“DAPASK”) substitutions, G237A, D265A, and P329A (“GADAPA”) substitutions, G237A, D265A, P329A, and S267K (“GADAPASK”) substitutions, L234A, L235A, and P329G (“LALAPG”) substitutions, or L234A, L235A, and P329A (“LALAPA”) substitutions, wherein the amino acid residues are numbered according to the EU numbering system.

[0026] Provided herein is a CD19 binding molecule that specifically binds to human CD19 and comprises (a) CDR-H1, CDR-H2, and CDR-H3 having the amino acid sequences of SEQ ID NO:7, SEQ ID NO:8, and SEQ ID NO:9, and CDR-L1, CDR-L2, and CDR-L3 having the amino acid sequences of SEQ ID NO:20, SEQ ID NO:21, and SEQ ID NO:22; and (b) a first variant human IgG1 Fc region and a second variant human IgG1 Fc region forming a Fc domain, wherein the first and second variant Fc regions comprise L234A, L235A, and G237A (“LALAGA”) substitutions, L234A, L235A, S267K, and P329A (“LALASKPA”) substitutions, D265A, P329A, and S267K (“DAPASK”) substitutions, G237A, D265A, and P329A (“GADAPA”) substitutions, G237A, D265A, P329A, and S267K (“GADAPASK”) substitutions, L234A, L235A, and P329G (“LALAPG”) substitutions, or L234A, L235A, and P329A (“LALAPA”) substitutions, wherein the amino acid residues are numbered according to the EU numbering system.

[0027] Provided herein is a CD19 binding molecule that specifically binds to human CD19 and comprises (a) CDR-H1, CDR-H2, and CDR-H3 having the amino acid sequences of SEQ ID NO:10, SEQ ID NO:11, and SEQ ID NO:12, and CDR-L1, CDR-L2, and CDR-L3 having the amino acid sequences of SEQ ID NO:23, SEQ ID NO:24, and SEQ ID NO:25; and a first human IgG1 variant Fc region and a second human IgG1 variant Fc region forming a Fc domain, wherein the first and second variant Fc regions comprise L234A, L235A, and G237A (“LALAGA”) substitutions, L234A, L235A, S267K, and P329A (“LALASKPA”) substitutions, D265A, P329A, and S267K (“DAPASK”) substitutions, G237A, D265A, and P329A (“GADAPA”) substitutions, G237A, D265A, P329A, and S267K (“GADAPASK”) substitutions, L234A, L235A, and P329G (“LALAPG”) substitutions, or L234A, L235A, and P329A (“LALAPA”) substitutions, wherein the amino acid residues are numbered according to the EU numbering system.

[0028] In some embodiments, the CD19 binding molecule can comprise a VH having the amino acid sequence of SEQ ID NO:13. The CD19 binding molecule can also comprise a VL having the amino acid sequence of SEQ ID NO:26.

[0029] In some embodiments, the CD19 binding molecule is a multispecific binding molecule (MBM) comprising (a) an antigen-binding module 1 (ABM1) that binds specifically to CD19; and (b) an antigen-binding module 2 (ABM2) that binds specifically to a different target molecule. In some embodiments, the target molecule is a component of a human T-cell receptor (TCR) complex.

[0030] In some embodiments, the CD19 binding molecule has an ABM1 that is an antibody, an antibody fragment, an scFv, a dsFv, a Fv, a Fab, an scFab, a (Fab′)2, a single domain antibody (SDAB), a VH or VL domain, or a camelid VHH domain. For example, in some embodiments, the ABM1 is a Fab. In other embodiments, the ABM1 is an anti-CD19 antibody or an antigen-binding domain thereof.

[0031] In some embodiments, the CD19 binding molecule has an ABM2 that is an immunoglobulin scaffold based ABM. For example, the ABM2 can be an antibody, an antibody fragment, an scFv, a dsFv, a Fv, a Fab, an scFab, a (Fab′)2, a single domain antibody (SDAB), a VH or VL domain, or a camelid VHH domain. As a specific example, the ABM2 is an scFv. In some embodiments, the ABM2 can bind specifically to a component of a human T-cell receptor (TCR) complex. For example, the component of the TCR complex can be CD3. In some embodiments, the ABM2 is an anti-CD3 antibody or an antigen-binding domain thereof. Should the CD19 binding molecule bind to CD3, the ABM2 can comprise the CDR sequences of any one of CD3-1 to CD3-130. More specifically, the ABM2 can comprise the CDR sequences of CD3-21.

[0032] In some embodiments, the CDR sequences of the CD3 binding portion of the binding molecule as described herein can be defined by Kabat numbering, as set forth in Table 12B. The CDR sequences of the CD3 binding portion of the binding molecule as described herein can also be defined by Chothia numbering, as set forth in Table 12C. The CDR sequences of the CD3 binding portion of the binding molecule as described herein can also be defined by a combination of Kabat and Chothia numbering, as set forth in Table 12D.

[0033] In some embodiments, the CD19 binding molecule can have an ABM2 that comprises the heavy and light chain variable sequences of CD3-21, as set forth in Table 12A.

[0034] More specifically, the CD19 binding molecule can be a trispecific binding molecule (TBM) comprising an antigen-binding module 3 (ABM3) that binds specifically to a target molecule other than CD19.

[0035] In some embodiments, the CD19 binding molecule can have an ABM2 that binds specifically to a component of a human T-cell receptor (TCR) complex and ABM3 binds specifically to human CD2. In some embodiments, the CD19 binding molecule is trivalent. The CD19 binding molecule can have any one of the configurations depicted in FIGS. 2A-2P. For example, the CD19 binding molecule has the configuration depicted in FIG. 2I. In some embodiments, the CD19 binding molecule has the configuration referred to as T2 in Section 7.6.1.

[0036] In a specific embodiment, the CD19 binding molecule has an ABM3 that binds specifically to human CD2. In some embodiments, the ABM3 is a non-immunoglobulin scaffold based ABM. Where the ABM3 binds to human CD2, the ABM3 can comprise a receptor binding domain of a CD2 ligand. For example, the ABM3 can be a CD58 moiety. In some embodiments, the CD58 moiety comprises the amino acid sequence of CD58-6 as set forth in Table 15.

[0037] The CD19 binding molecule can have modifications in its Fc region. For example, the first variant Fc region and the second variant Fc region can comprise L234A, L235A, and G237A (“LALAGA”) substitutions, where the amino acid residues are numbered according to the EU numbering system. In another embodiment, the first variant Fc region and the second variant Fc region can comprise L234A, L235A, S267K, and P329A (“LALASKPA”) substitutions, where the amino acid residues are numbered according to the EU numbering system. In still another embodiment, the first variant Fc region and the second variant Fc region can comprise D265A, P329A, and S267K (“DAPASK”) substitutions, where the amino acid residues are numbered according to the EU numbering system. In other embodiments, the first variant Fc region and the second variant Fc region can comprise G237A, D265A, and P329A (“GADAPA”) substitutions, where the amino acid residues are numbered according to the EU numbering system. In another embodiment, the first variant Fc region and the second variant Fc region can comprise G237A, D265A, P329A, and S267K (“GADAPASK”) substitutions, where the amino acid residues are numbered according to the EU numbering system. In another embodiment, the first variant Fc region and the second variant Fc region can comprise L234A, L235A, and P329G (“LALAPG”) substitutions, where the amino acid residues are numbered according to the EU numbering system. In another embodiment, the first variant Fc region and the second variant Fc region can comprise L234A, L235A, and P329A (“LALAPA”) substitutions, where the amino acid residues are numbered according to the EU numbering system.

[0038] The CD19 binding molecule's Fc regions can have a first variant Fc region and the second variant Fc region, which together form an Fc heterodimer. For example, the Fc heterodimer can comprise knob-in-hole (“KIH”) modifications. In some embodiments, the first and second variant Fc regions can comprise the amino acid substitutions T366W: T366S/L368A/Y407V.

[0039] In a specific example, the CD19 binding molecule is trispecific binding molecule (TBM) comprising (a) an antigen-binding module 1 (ABM1) that binds specifically to CD19 and comprises CDR-H1, CDR-H2, and CDR-H3 having the amino acid sequences of SEQ ID NO:4, SEQ ID NO:5, and SEQ ID NO:6, and CDR-L1, CDR-L2, and CDR-L3 having the amino acid sequences of SEQ ID NO:17, SEQ ID NO:18, and SEQ ID NO:19; (b) an antigen-binding module 2 (ABM2) that binds specifically to a component of a human T-cell receptor (TCR) complex; (c) an antigen-binding module 3 (ABM3) that binds specifically to human CD2; and (d) a first variant human IgG1 Fc region and a second variant human IgG1 Fc region forming a Fc domain, where the first and second variant Fc regions comprise L234A, L235A, and G237A (“LALAGA”) substitutions, L234A, L235A, S267K, and P329A (“LALASKPA”) substitutions, D265A, P329A, and S267K (“DAPASK”) substitutions, G237A, D265A, and P329A (“GADAPA”) substitutions, G237A, D265A, P329A, and S267K (“GADAPASK”) substitutions, L234A, L235A, and P329G (“LALAPG”) substitutions, or L234A, L235A, and P329A (“LALAPA”) substitutions, where the amino acid residues are numbered according to the EU numbering system. In this specific example, the CD19 binding molecule is trivalent. Additionally, the ABM1 is a Fab. In this specific example, the Fab comprises a VH having the amino acid sequence of SEQ ID NO:13 and a VL having the amino acid sequence of SEQ ID NO:26. Further, the CD19 binding molecule can bind to a component of the TCR complex that is CD3. In this example, the ABM2 is an anti-CD3 antibody or an antigen-binding domain thereof. The sequences of the ABM2 comprises the CDR sequences of CD3-21. For example, the ABM2 comprises the heavy and light chain variable sequences of CD3-21, as set forth in Table 12A. The anti-CD3 antibody or antigen-binding domain thereof is in the form of a scFv in this example. Further, the ABM2 comprises the amino acid sequence of the scFv designated as CD3-21 in Table 12A. Regarding the ABM3 arm in this example, ABM3 is a CD58 moiety. More specifically, the ABM3 comprises the amino acid sequence of CD58-6 as set forth in Table 15.

[0040] In another specific example, the CD19 binding molecule is a trispecific binding molecule (TBM) comprising (a) an antigen-binding module 1 (ABM1) that binds specifically to CD19 and which is a Fab comprising CDR-H1, CDR-H2, and CDR-H3 having the amino acid sequences of SEQ ID NO:4, SEQ ID NO:5, and SEQ ID NO:6, and CDR-L1, CDR-L2, and CDR-L3 having the amino acid sequences of SEQ ID NO:17, SEQ ID NO:18, and SEQ ID NO:19; (b) an antigen-binding module 2 (ABM2) that binds specifically to CD3 and which comprises the amino acid sequence of the scFv designated as CD3-21 in Table 12A; (c) an antigen-binding module 3 (ABM3) that binds specifically to human CD2 and which comprises the amino acid sequence of CD58-6 as set forth in Table 15; and (d) a first variant human IgG1 Fc region and a second variant human IgG1 Fc region forming a Fc domain, where the first and second variant Fc regions comprise L234A, L235A, and G237A (“LALAGA”) substitutions, L234A, L235A, S267K, and P329A (“LALASKPA”) substitutions, D265A, P329A, and S267K (“DAPASK”) substitutions, G237A, D265A, and P329A (“GADAPA”) substitutions, G237A, D265A, P329A, and S267K (“GADAPASK”) substitutions, L234A, L235A, and P329G (“LALAPG”) substitutions, or L234A, L235A, and P329A (“LALAPA”) substitutions, where the amino acid residues are numbered according to the EU numbering system. In this example, the ABM1 comprises a VH having the amino acid sequence of SEQ ID NO:13 and a VL having the amino acid sequence of SEQ ID NO:26. Further, the CD19 binding molecule has the configuration depicted in FIG. 2I and referred to as T2 in Section 7.6.1.

[0041] The CD19 binding molecules described throughout can be made into a pharmaceutical composition. For example, the pharmaceutical composition comprises (a) any one of the CD19 binding molecules or conjugates described throughout the specification and (b) an excipient. Further, the CD19 binding molecules or conjugates described throughout the specification can be used in a combination therapy. For example, described is a combination comprising the CD19 binding molecule described throughout and at least one additional therapeutic agent. The one or more additional therapeutic agents can comprise an immunomodulatory imide drug (IMiD). For example, the IMiD can be lenalidomide, thalidomide, pomalidomide, or iberdomide. In a specific example, the IMiD is lenalidomide.

[0042] The CD19 binding molecule (or composition or combination) described throughout can be used as a medicament. The CD19 binding molecule (or composition or combination) described throughout can also be used to treat a subject in need thereof. For example, the CD19 binding molecule (or composition or combination) can be used in a method of treating a subject with a CD19-associated disease or disorder, comprising administering to the subject an effective amount of the CD19 binding molecule described throughout. The conjugate described throughout can also be used to treat the subject in need thereof. In some embodiments, the pharmaceutical composition described throughout can be used in a method of treating a subject with a CD19-associated disease or disorder, comprising administering to the subject an effective amount of the pharmaceutical composition (or combination) described throughout. The CD19-associated disease or disorder can be diffuse large B-cell lymphoma (DLBCL). More specifically, the DLBCL can be relapsed or refractory DLBCL. The CD19-associated disease or disorder can be Acute Lymphoblastic Leukemia (ALL). More specifically, the ALL can be relapsed or refractory ALL.

[0043] The CD19 binding molecules described throughout can be encoded by a nucleic acid or a plurality of nucleic acids.

[0044] A cell can be engineered to express the CD19 binding molecules described throughout. These cells can be used in a method of producing the CD19 binding molecule. For example, described is a method of producing a CD19 binding molecule (as described throughout) comprising (a) culturing the cell engineered to express the CD19 binding molecules described throughout in conditions under which the CD19 binding molecule is expressed; and (b) recovering the CD19-binding molecule from the cell culture.

### 6. BRIEF DESCRIPTION OF THE FIGURES

[0045] FIGS. 1A-1AH: Exemplary BBM configurations. FIG. 1A illustrates components of the exemplary BBM configurations illustrated in FIGS. 1B-1AH. Not all regions connecting the different domains of each chain are illustrated (e.g., the linker connecting the VH and VL domains of an scFv, the hinge connecting the CH2 and CH3 domains of an Fc domain, etc., are omitted). FIGS. 1B-1F illustrate bivalent BBMs; FIGS. 1G-1Z illustrate trivalent BBMs; FIGS. 1AA-1AH illustrate tetravalent BBMs.

[0046] FIGS. 2A-2V: Exemplary TBM configurations. FIG. 2A illustrates components of the exemplary TBM configurations illustrated in FIGS. 2B-2V. Not all regions connecting the different domains of each chain are illustrated (e.g., the linker connecting the VH and VL domains of an scFv, the hinge connecting the CH2 and CH3 domains of an Fc, etc., are omitted). FIG. 2B-2P illustrates trivalent TBMs; FIGS. 2Q-2S illustrate tetravalent TBMs; FIG. 2T illustrates a pentavalent TBM, and FIGS. 2U-2V illustrate hexavalent TBMs.

[0047] FIGS. 3A-3C: Schematics of the bispecific (FIG. 3A and FIG. 3C) and trispecific (FIG. 3B) constructs of Example 1.

[0048] FIGS. 4A-4B: Ability of CD19 BBMs to elicit redirected T-cell cytotoxic activity (RTCC) against CD19+ target cells. Both NEG258-based and NEG218-based BBMs mediated RTCC activity against CD19+ target cell lines. Nalm6-luc (FIG. 4A) and Karpas422-luc (FIG. 4B) cells were co-cultured with expanded T cells in the presence of serial diluted BBMs at an effector cell: target cell (E:T) ratio of 3:1. Luminescence signal was measured after 24 h of incubation.

[0049] FIGS. 5A-5B: Ability of CD19 BBMs to elicit T-cell proliferation. Both NEG258-based and NEG218-based BBMs induced T cell proliferation. Karpas422-luc (FIG. 5A) and Nalm6-luc (FIG. 5B) cells were co-cultured with expanded T cells in the presence of serial diluted BBMs at an E:T ratio of 1:1. Luminescence signal was measured after 96 h of incubation.

[0050] FIGS. 6A-6F: Ability of CD19 TBMs to elicit CD2 dependent T cell activation. CD2 knock out attenuated advantage of trispecific constructs. FIGS. 6A-6B show representative flow cytometry analysis of CD2 expression on JNL CD2 WT (FIG. 6A) and KO (FIG. 6B) cells. Staining by the anti-CD2 mAb (dot filled histogram) is overlaid with that of the mIgG1 isotype control (diagonal line filled histogram) or unstained (open histogram). FIGS. 6C-6F show data for JNL CD2⁺ (FIG. 6C-6D) and CD2⁻ (FIG. 6E-6F) cells co-cultured with CD19⁺ target cells in the presence of serial diluted BBMs and TBMs at an E:T ratio of 3:1. Luminescence signal was measured after 24 h of incubation.

[0051] FIGS. 7A-7B: Binding of CD19 TBMs to cyno B cells. FIG. 7A shows data for a TBM with a NEG218-based CD19 binding arm and FIG. 7B shows data for a TBM with a NEG258-based CD19 binding arm.

[0052] FIGS. 8A-8H: Ability of CD19 TBMs to induce T cell activation upon cyno B cell depletion in PBMCs. In FIG. 8A, PBMCs were isolated from cyno monkey whole blood using ficoll gradient centrifugation and were incubated with bi or trispecific constructs for overnight. Samples were harvested and simultaneously stained for CD3 and CD20 to identify B and T cells within the PBMC population. Percentage of B cell depletion was calculated as described in Section 8.6.1. FIGS. 8B-8H show the results of FACS analysis of CD69 and CD25 expression on CD3⁺ T cells to determine single (CD69⁺ CD25⁻ or CD69-CD25⁺) or double-positive cells (CD69⁺CD25⁻). FIG. 8B: untreated (media only); FIGS. 8C-8E: CD3hi TSP1L; FIGS. 8F-8H: CD3hi TSP1.

[0053] FIGS. 9A-9P: Ability of NEG258- and NEG218-based TBMs to induce redirected T cell cytotoxicity by human donor cells against Nalm6 (FIGS. 9A-9H) and Karpas422 (FIGS. 91-9P) target cells.

[0054] FIGS. 10A-10P: Ability of NEG258- and NEG218-based TBMs with different CD3 affinities to induce redirected T cell cytotoxicity by human donor cells against Nalm6 (FIGS. 10A-10H) and Karpas422 (FIGS. 101-10P) target cells.

[0055] FIGS. 11A-11L: Ability of NEG258-based TBMs that include a CD2-binding arm and those that include a control lysozyme binding arm to induce redirected T cell cytotoxicity by human donor cells against Nalm6 (FIGS. 11A-11H) and Karpas422 (FIGS. 111-11L) target cells.

[0056] FIGS. 12A-12C: Induction of T cell cytokine release by NEG258- and NEG218-based TBMs. FIG. 12A: IFN-γ; FIG. 12B: TNF-α; FIG. 12C: IL2.

[0057] FIGS. 13A-13C: Binding of NEG258- and NEG218-based TBMs to murine 300.19 cell lines that overexpress human CD19 (FIG. 13A) or cyno CD19 (FIG. 13B). The TBMs show negligible binding to the wild type 300.19 cell line (FIG. 13C).

[0058] FIG. 14: A schematic representation of CD58.

[0059] FIG. 15: Redirected T cell cytotoxicity by TBMs containing CD58 variant sequences.

[0060] FIG. 16: Antigen-independent T-cell activation by TBMs containing CD58 variant sequences. Data expressed as relative luminescence units (RLU).

[0061] FIGS. 17A-17H: CD19 and CD58 expression on various cell lines: FIGS. 17A-17B: CD19 and CD58 expression, respectively, on OCI-LY-19 cells; FIGS. 17C-17D: CD19 and CD58 expression, respectively, on Karpas-422 cells; FIGS. 17E-17F: CD19 and CD58 expression, respectively, on Toledo cells; FIGS. 17G-17H: CD19 and CD58 expression, respectively, on Nalm-6 cells.

[0062] FIGS. 18A-18B: Ability of NEG258-based TBMs and BBM to induce redirected T cell cytotoxicity by human donor cells against Karpas422 target cells. FIG. 18A and FIG. 18B show data using T cells from two different donors.

[0063] FIGS. 19A-19F: Induction of T cell cytokine release by NEG258-based TBMs and BBM. FIGS. 19A-19B: IFN-γ (donor 1 and donor 2, respectively); FIGS. 19C-19D: IL-2 (donor 1 and donor 2, respectively); FIGS. 19E-19F: TNF-α (donor 1 and donor 2, respectively). Triangles on X-axis indicate decreasing concentration of constructs from left to right in the figures.

[0064] FIG. 20: NEG258-based TBM and BBM binding to T cells.

[0065] FIGS. 21A-21C: NEG258-based TBM and BBM mediated T cell proliferation. FIG. 21A: T cell proliferation in OC-LY-19 co-culture; FIG. 21B: T cell proliferation in Karpas422 co-culture; FIG. 21C: T cell proliferation in Toledo co-culture.

[0066] FIGS. 22A-22B: Ability of NEG258-based TBMs and BBM to induce redirected T cell cytotoxicity by human donor cells against Karpas422 target cells. FIG. 22A and FIG. 22B show data using T cells from two different donors.

[0067] FIGS. 23A-23J: Ability of NEG258-based TBMs and BBM to induce redirected T cell cytotoxicity by human donor cells against various target cells. FIGS. 23A-23B: OC-LY-19 (donor 1 and donor 2, respectively); FIGS. 23C-23D: Toledo (donor 1 and donor 2, respectively); FIGS. 23E-23F: Nalm6 (donor 1 and donor 2, respectively); FIGS. 23G-23H: Nalm6 KO (donor 1 and donor 2, respectively); FIGS. 231-23J: K562 (donor 1 and donor 2, respectively).

[0068] FIGS. 24A-24J: Induction of T cell cytokine release by NEG258-based TBMs and BBM in various target cells. FIGS. 24A-24B: TNF-α from OC-LY-19 (donor 1 and donor 2, respectively); FIGS. 24C-24D: TNF-α from Toledo (donor 1 and donor 2, respectively); FIGS. 24E-24F: TNF-α from Nalm6 (donor 1 and donor 2, respectively); FIGS. 24G-24H: TNF-α from Nalm6 KO (donor 1 and donor 2, respectively); FIGS. 241-24J: TNF-α from K562 (donor 1 and donor 2, respectively).

[0069] FIGS. 25A-25H: Re-challenge RTCC assay with Karpas 422 and OCI-LY-19 cell lines. FIG. 25A: assay set-up. FIGS. 25B-25D: Karpas 422 (post first challenge, post second challenge, and post third challenge, respectively); FIGS. 25E-25H OCI-LY-19 (post first challenge, post second challenge, post third challenge, and post fourth challenge, respectively).

[0070] FIGS. 26A-26P: Re-challenge T cell phenotyping with Karpas 422 and OCI-LY-19 cell lines. FIGS. 26A-26H: Karpas 422 phenotyping; FIGS. 261-26P: OCI-LY-19 phenotyping. FIGS. 26A and 26I: % IL-2+CD4 T cells; FIGS. 26B and 26J: % IFNγ+CD4 T cells; FIGS. 26C and 26K: % IL-2+CD8 T cells; FIGS. 26D and 26L: % IFNγ+CD8 T cells; FIGS. 26E and 26M: CD3 young; FIGS. 26F and 26N: CD4 old; FIGS. 26G and 26O: CD8 young; FIGS. 26H and 26P: CD8 old. Lines in figures represent different T cell donors.

[0071] FIGS. 27A-27D: Ability of CD3hi TSP1 vs. CD3hi BSP1 to elicit T cell proliferation in presence of CD19+ target cells. Nalm6-luc cells were co-cultured for 72 h with sorted CD28⁺ or CD28⁻ CD8 T cells at an E:T ratio of 1:3 in the presence of 1 nM (FIGS. 27A-27B) or 0.1 nM (FIGS. 27C-27D) CD3hi TSP1 or CD3hi BSP1 and in presence (FIGS. 27A and 27C) or absence (FIGS. 27B and 27D) of irradiated autologous PBMCs (T cells depleted). Proliferation was measured as percentage of CFSE-diluted cells among the live cells.

[0072] FIGS. 28A-28L: Ability of CD3hi TSP1 and CD3hi BSP1 to induce T cells' cytokines production in presence of Nalm6 CD19+ target cells (E:T 1:3). FIGS. 28A-28B: median fluorescence intensity (MFI) for GzB (FIG. 28A) and IFN-γ (FIG. 28B) producing CD28⁻ and CD28⁺ CD8 T cells, when co-cultured in presence of irradiated PBMCs and 1 nM CD3hi TSP1 or 1 nM CD3hi BSP1. FIGS. 28C-28D: MFI for GzB (FIG. 28C) and IFN-γ (FIG. 28D) producing CD28⁻ and CD28⁺ CD8 T cells, when co-cultured in absence of irradiated PBMCs and 1 nM CD3hi TSP1 or 1 nM CD3hi BSP1. FIGS. 28E-28F: MFI for GzB (FIG. 28E) and IFN-γ (FIG. 28F) producing CD28⁻ and CD28⁺ CD8 T cells, when co-cultured in presence of irradiated PBMCs and 0.1 nM CD3hi TSP1 or 0.1 nM CD3hi BSP1. FIGS. 28G-28H: MFI for GzB (FIG. 28G) and IFN-γ (FIG. 28H) producing CD28⁻ and CD28⁺ CD8 T cells, when co-cultured in absence of irradiated PBMCs and 0.1 nM CD3hi TSP1 or 0.1 nM CD3hi BSP1. FIGS. 28I-28L: proportions of live T cells, when co-cultured in the presence (FIGS. 28I and 28K) or absence (FIGS. 28J and 28L) of irradiated PBMCs and 1 nM (FIGS. 28I and 28J) or 0.1 nM (FIG. 28K and FIG. 28L) CD3hi TSP1 or CD3hi BSP1.

[0073] FIGS. 29A-29I: Ability of CD3hi TSP1 vs. CD3hi BSP1 to induce changes in T cell phenotype. FIG. 29A: Representative example of CD28⁻ and CD28⁺ T cells sorted for CCR7 and CD45RO expression. FIGS. 29B-291: distribution of different T cell populations defined according to the combined expression of the two surface markers CD45RO and CCR7 (naive, CD45RO⁻CCR7⁺; central memory (CM), CD45RO⁺CCR7⁺; effector memory (EM), CD45RO⁺CCR7⁻; and terminally differentiated (TEMRA), CD45RO⁻CCR7⁻) following 72 hour co-culture (E:T 1:3) in the presence (FIGS. 29B-29E) or absence (FIGS. 29F-291) of PBMCs and presence of 1 nM (FIGS. 29B-29C and 29F-29G) or 0.1 nM (FIGS. 29D-29E and 29H-29I) CD3hi TSP1 or CD3hi BSP1. Data for proliferating cells (CFSE−) are shown in FIGS. 29B, 29D, 29F, and 29H. Data for non-proliferating cells (CSFE+) are shown in FIGS. 29C, 29E, 29G, and 29I. Data for CD28− cells are shown on the left side of each figure and data for CD28+ cells are shown on the right side of the figure.

[0074] FIGS. 30A-30D: Ability of CD3hi TSP1 vs. CD3hi BSP1 to elicit redirected T-cell cytotoxic activity (RTCC) against CD19+ target cells. RTCC results from Nalm6-luc cells co-cultured for 72 h with sorted CD28⁺ or CD28⁻ CD8 T cells at an E:T ratio of 1:3 in the presence of 1 nM (FIGS. 30A and 30C) or 0.1 nM (FIGS. 30B and 30D) of CD3hi BSP1, CD3hi TSP1, or CD3hi TSP1C and in the presence (FIGS. 30A and 30B) or absence (FIGS. 30C and 30D) of irradiated autologous PBMCs (T cells depleted). (n=3) Luminescence signal was measured at the end of the co-culture incubation. Results are expressed as fold increase vs. untreated condition, where no antibodies were added in order to evaluate the background signal given by the control antibody.

[0075] FIGS. 31A-31B: Anti-tumor activity of CD3hi TSP1 (FIG. 31A) and CD3med TSP1 (FIG. 31B) in a human PBMC adoptive transfer adaptation of the OCI-LY-19 subcutaneous tumor model.

[0076] FIGS. 32A-32B: Body weight change following treatment with CD3hi TSP1 (FIG. 32A) and CD3med TSP1 (FIG. 32B) in a human PBMC adoptive transfer adaptation of the OCI-LY-19 subcutaneous tumor model.

[0077] FIG. 33: Schematic of the humanization process of a NSG mouse.

[0078] FIGS. 34A-34B: Anti-tumor activity of CD3 TSP1, CD3hi BSP1 and CD3med TSP1 in a DLBCL subcutaneous tumor model in huCD34+ NSG mice (FIG. 34A) and body weight change following treatment with CD3 TSP1, CD3hi BSP1 and CD3med TSP1 in the DLBCL subcutaneous tumor model in huCD34+ NSG mice (FIG. 34B).

[0079] FIGS. 35A-35D: Anti-tumor activity (FIGS. 35A and 35C) and body weight response (FIG. 35B and FIG. 35D) following antibody treatment with CD3hi TSP1 (FIGS. 35A and 35B) and CD3med TSP1 (FIGS. 35C and 35D) in a OCI-LY-19 DLBCL subcutaneous tumor model in huCD34+ NSG mice.

[0080] FIGS. 36A-36C: Anti-tumor activity of CD3hi BSP1 (FIG. 36A), CD3hi TSP1 (FIG. 36B), and CD3med TSP1 (FIG. 36C) in a human PBMC adoptive transfer adaptation of the Daudi-Luc subcutaneous tumor model.

[0081] FIGS. 37A-37C: Body weight change following antibody treatment with CD3hi BSP1 (FIG. 37A), CD3hi TSP1 (FIG. 37B), or CD3med TSP1 (FIG. 37C) in a human PBMC adoptive transfer adaptation of the Daudi-Luc subcutaneous tumor model.

[0082] FIGS. 38A-38B: Shows schematic overview of a Biacore measuring cycle. FIGS. 39A.1-39C.11: Shows representative sensorgrams and response and concentration plots. FIG. 39A.1 to FIG. 39A.11 (collectively, “FIG. 39A”) show representative sensorgrams and response plots of WT IgG1, LALAPA-IgG1, LALAGA-IgG1, LALAPG-IgG1, DAPA-IgG1, LALASKPA-IgG1, DAPASK-IgG1, GADAPA-IgG1, GADAPASK-IgG1 and DANAPA-IgG1. (Concentration range: 0.2 nM-100 nM for human FcγR1A); FIG. 39B.1 to FIG. B.11 (collectively, “FIG. 39B”) show sensorgrams and binding kinetics of WT, LALAPA-IgG1, LALAGA-IgG1, LALAPG-IgG1, DAPA-IgG1, LALASKPA-IgG1, DAPASK-IgG1, GADAPA-IgG1, GADAPASK-IgG1 and DANAPA-IgG1 towards FcgammaR3A V158 (Concentration range: 1.95 nM-1000 nM for human FcγR3A V158); FIG. 39C.1 to FIG. 39C.11 (“collectively, “FIG. 39C”) show sensorgrams and binding kinetics of WT, LALAPA-IgG1, LALAGA-IgG1, LALAPG-IgG1, DAPA-IgG1, LALASKPA-IgG1, DAPASK-IgG1, GADAPA-IgG1, GADAPASK-IgG1 and DANAPA-IgG1 towards C1q. (Concentration range: 0.49 nM-250 nM for human C1q)

[0083] FIGS. 40A-40B: FIG. 40A shows the nuclear factor of activated T-cells (NFAT) pathway activity of the wild type and mutated antibodies. FIG. 40B shows the NFAT pathway activity of the wild type and mutated antibodies, cells sensitized with addition of INFgamma.

[0084] FIGS. 41A-41E: Shows representative sensorgrams and response plots of WT, DANAPA, GADAPASK, LALA and LALASKPA variants. (Concentration range: 0.2 nM-25 nM for human FcγR1A)

[0085] FIG. 42: Shows the nuclear factor of activated T-cells (NFAT) pathway activity of the wild type and mutated antibodies.

### 7. DETAILED DESCRIPTION

### 7.1. Definitions

[0086] As used herein, the following terms are intended to have the following meanings:

[0087] ABM chain: Individual ABMs can exist as one (e.g., in the case of an scFv) polypeptide chain or form through the association of more than one polypeptide chains (e.g., in the case of a Fab). As used herein, the term “ABM chain” refers to all or a portion of an ABM that exists on a single polypeptide chain. The use of the term “ABM chain” is intended for convenience and descriptive purposes only and does not connote a particular configuration or method of production.

[0088] ADCC: By “ADCC” or “antibody dependent cell-mediated cytotoxicity” as used herein is meant the cell-mediated reaction where nonspecific cytotoxic cells that express FcγRs recognize bound antibody on a target cell and subsequently cause lysis of the target cell. ADCC is correlated with binding to FcγRIIIa; increased binding to FcγRIIIa leads to an increase in ADCC activity.

[0089] ADCP: By “ADCP” or antibody dependent cell-mediated phagocytosis as used herein is meant the cell-mediated reaction where nonspecific phagocytic cells that express FcγRs recognize bound antibody on a target cell and subsequently cause phagocytosis of the target cell.

[0090] Additional Agent: For convenience, an agent that is used in combination with an antigen-binding molecule of the disclosure is referred to herein as an “additional” agent.

[0091] Antibody: The term “antibody” as used herein refers to a polypeptide (or set of polypeptides) of the immunoglobulin family that is capable of binding an antigen non-covalently, reversibly and specifically. For example, a naturally occurring “antibody” of the IgG type is a tetramer comprising at least two heavy (H) chains and two light (L) chains inter-connected by disulfide bonds. Each heavy chain is comprised of a heavy chain variable region (abbreviated herein as VH) and a heavy chain constant region. The heavy chain constant region is comprised of three domains, CH1, CH2 and CH3. Each light chain is comprised of a light chain variable region (abbreviated herein as VL) and a light chain constant region. The light chain constant region is comprised of one domain (abbreviated herein as CL). The VH and VL regions can be further subdivided into regions of hypervariability, termed complementarity determining regions (CDR), interspersed with regions that are more conserved, termed framework regions (FR). Each VH and VL is composed of three CDRs and four FRs arranged from amino-terminus to carboxy-terminus in the following order: FR1, CDR1, FR2, CDR2, FR3, CDR3, FR4. The variable regions of the heavy and light chains contain a binding domain that interacts with an antigen. The constant regions of the antibodies can mediate the binding of the immunoglobulin to host tissues or factors, including various cells of the immune system (e.g., effector cells) and components of the classical complement system. The term “antibody” includes, but is not limited to, monoclonal antibodies, human antibodies, humanized antibodies, camelised antibodies, chimeric antibodies, bispecific or multispecific antibodies and anti-idiotypic (anti-Id) antibodies (including, e.g., anti-Id antibodies to antibodies of the disclosure).

[0092] Both the light and heavy chains are divided into regions of structural and functional homology. The terms “constant” and “variable” are used functionally. In this regard, it will be appreciated that the variable domains of both the light (VL) and heavy (VH) chain portions determine antigen recognition and specificity. Conversely, the constant domains of the light chain (CL) and the heavy chain (CH1, CH2 or CH3) confer important biological properties such as secretion, transplacental mobility, Fc receptor binding, complement binding, and the like. By convention the numbering of the constant region domains increases as they become more distal from the antigen-binding site or amino-terminus of the antibody. In a wild-type antibody, at the N-terminus is a variable region and at the C-terminus is a constant region; the CH3 and CL domains actually comprise the carboxy-terminus of the heavy and light chain, respectively.

[0093] Antibody fragment: The term “antibody fragment” of an antibody as used herein refers to one or more portions of an antibody. In some embodiments, these portions are part of the contact domain(s) of an antibody. In some other embodiments, these portion(s) are antigen-binding fragments that retain the ability of binding an antigen non-covalently, reversibly and specifically, sometimes referred to herein as the “antigen-binding fragment”, “antigen-binding fragment thereof,” “antigen-binding portion”, and the like. Examples of binding fragments include, but are not limited to, single-chain Fvs (scFv), a Fab fragment, a monovalent fragment consisting of the VL, VH, CL and CH1 domains; a F(ab)2 fragment, a bivalent fragment comprising two Fab fragments linked by a disulfide bridge at the hinge region; a Fd fragment consisting of the VH and CH1 domains; a Fv fragment consisting of the VL and VH domains of a single arm of an antibody; a dAb fragment (Ward et al., 1989, Nature 341:544-546), which consists of a VH domain; and an isolated complementarity determining region (CDR). Thus, the term “antibody fragment” encompasses both proteolytic fragments of antibodies (e.g., Fab and F(ab)2 fragments) and engineered proteins comprising one or more portions of an antibody (e.g., an scFv).

[0094] Antibody fragments can also be incorporated into single domain antibodies, maxibodies, minibodies, intrabodies, diabodies, triabodies, tetrabodies, v-NAR and bis-scFv (see, e.g., Hollinger and Hudson, 2005, Nature Biotechnology 23: 1126-1136). Antibody fragments can be grafted into scaffolds based on polypeptides such as Fibronectin type III (Fn3) (see U.S. Pat. No. 6,703,199, which describes fibronectin polypeptide monobodies).

[0095] Antibody fragments can be incorporated into single chain molecules comprising a pair of tandem Fv segments (for example, VH-CH1-VH-CH1) which, together with complementary light chain polypeptides (for example, VL-VC-VL-VC), form a pair of antigen-binding regions (Zapata et al., 1995, Protein Eng. 8:1057-1062; and U.S. Pat. No. 5,641,870).

[0096] Antibody Numbering System: In the present specification, the references to numbered amino acid residues in antibody domains are based on the EU numbering system unless otherwise specified (for example, in Table 1). This system was originally devised by Edelman et al., 1969, Proc. Nat'l Acad. Sci. USA 63:78-85 and is described in detail in Kabat et al., 1991, in Sequences of Proteins of Immunological Interest, US Department of Health and Human Services, NIH, USA.

[0097] Antigen-binding module: The term “antigen-binding module” or “ABM” as used herein refers to a portion of a MBM that has the ability to bind to an antigen non-covalently, reversibly and specifically. An ABM can be immunoglobulin- or non-immunoglobulin-based. As used herein, the terms “ABM1” and “CD19 ABM” (and the like) refer to an ABM that binds specifically to CD19, the terms “ABM2” and “TCR ABM” (and the like) refer to an ABM that binds specifically to a component of a TCR complex, the term “ABM3” refers to an ABM that binds specifically to CD2 or to a TAA (depending on context), the term “CD2 ABM” (and the like) refers to an ABM that binds specifically to CD2, and the term “TAA ABM” (and the like) refers to an ABM that binds specifically to a TAA. The terms ABM1, ABM2, and ABM3 are used merely for convenience and are not intended to convey any particular configuration of a MBM. In some embodiments, an ABM2 binds to CD3 (referred to herein a “CD3 ABM” or the like). Accordingly, disclosures relating to ABM2 and ABM2s are also applicable to CD3 ABMs.

[0098] Antigen-binding fragment: The term “antigen-binding fragment” of an antibody refers to a portion of an antibody that has the ability to bind to an antigen non-covalently, reversibly and specifically.

[0099] Antigen-binding molecule: The term “antigen-binding molecule” refers to a molecule comprising one or more antigen-binding domains, for example an antibody. The antigen-binding molecule can comprise one or more polypeptide chains, e.g., one, two, three, four or more polypeptide chains. The polypeptide chains in an antigen-binding molecule can be associated with one another directly or indirectly (for example a first polypeptide chain can be associated with a second polypeptide chain which in turn can be associated with a third polypeptide chain to form an antigen-binding molecule in which the first and second polypeptide chains are directly associated with one another, the second and third polypeptide chains are directly associated with one another, and the first and third polypeptide chains are indirectly associated with one another through the second polypeptide chain).

[0100] Associated: The term “associated” in the context of an antigen-binding molecule refers to a functional relationship between two or more polypeptide chains and/or two or more portions of a single polypeptide chain. In particular, the term “associated” means that two or more polypeptides (or portions of a single polypeptide) are associated with one another, e.g., non-covalently through molecular interactions and/or covalently through one or more disulfide bridges or chemical cross-linkages, so as to produce a functional antigen-binding molecule, e.g., a BBM or TBM in which the antigen binding domains can bind their respective targets. Examples of associations that might be present in a MBM include (but are not limited to) associations between Fc regions in an Fc domain (homodimeric or heterodimeric as described in Section 7.4.1.5), associations between VH and VL regions in a Fab or Fv, and associations between CH1 and CL in a Fab.

[0101] B cell: As used herein, the term “B cell” refers to a cell of B cell lineage, which is a type of white blood cell of the lymphocyte subtype. Examples of B cells include plasmablasts, plasma cells, lymphoplasmacytoid cells, memory B cells, follicular B cells, marginal zone B cells, B-1 cells, B-2 cells, and regulatory B cells.

[0102] B cell malignancy: As used herein, a B cell malignancy refers to an uncontrolled proliferation of B cells. Examples of B cell malignancy include non-Hodgkin's lymphomas (NHL), Hodgkin's lymphomas, leukemia, and myeloma. For example, a B cell malignancy can be, but is not limited to, multiple myeloma, chronic lymphocytic leukemia (CLL)/small lymphocytic lymphoma (SLL), follicular lymphoma, mantle cell lymphoma (MCL), diffuse large B-cell lymphoma (DLBCL), marginal zone lymphomas, Burkitt lymphoma, lymphoplasmacytic lymphoma (Waldenstrom macroglobulinemia), hairy cell leukemia, primary central nervous system (CNS) lymphoma, primary mediastinal large B-cell lymphoma, mediastinal grey-zone lymphoma (MGZL), splenic marginal zone B-cell lymphoma, extranodal marginal zone B-cell lymphoma of MALT, nodal marginal zone B-cell lymphoma, and primary effusion lymphoma, and plasmacytic dendritic cell neoplasms. For example DLBCL includes relapsed or refractory DLBCL (RR DLBCL or R/R DLBCL).

[0103] Binding Sequences: In reference to Tables 1, 12, 13, 14, 16, or 17 (including subparts thereof), the term “binding sequences” means an ABM having a full set of CDRs, a VH-VL pair, or an scFv set forth in that table.

[0104] Bispecific binding molecule: The term “bispecific binding molecule” or “BBM” refers to a molecule that specifically binds to two antigens and comprises two or more ABMs. The BBMs of the disclosure comprise at least one antigen-binding domain which is specific for CD19 and at least one antigen-binding domain which is specific for a different antigen, e.g., component of a TCR complex. Representative BBMs are illustrated in FIG. 1B-1AH. BBMs can comprise one, two, three, four or even more polypeptide chains.

[0105] Bivalent: The term “bivalent” as used herein in the context of an antigen-binding molecule refers to an antigen-binding molecule that has two antigen-binding domains. The domains can be the same or different. Accordingly, a bivalent antigen-binding molecule can be monospecific or bispecific. Bivalent BBMs can comprise an ABM that specifically binds to CD19 and another ABM that binds to another antigen, e.g., a component of the TCR complex.

[0106] Cancer: The term “cancer” refers to a disease characterized by the uncontrolled (and often rapid) growth of aberrant cells. Cancer cells can spread locally or through the bloodstream and lymphatic system to other parts of the body. Examples of various cancers are described herein and include but are not limited to, leukemia, multiple myeloma, asymptomatic myeloma, Hodgkin's lymphoma and non-Hodgkin's lymphoma, e.g., any CD19-positive cancers of any of the foregoing types. The term “cancerous B cell” refers to a B cell that is undergoing or has undergone uncontrolled proliferation.

[0107] CD3: The term “CD3” or “cluster of differentiation 3” refers to the duster of differentiation 3 co-receptor of the T cell receptor. CD3 helps in activation of both cytotoxic T-cell (e.g., CD8+ naive T cells) and T helper cells (e.g., CD4+ naive T cells) and is composed of four distinct chains: one CD3γ chain (e.g., Genbank Accession Numbers NM_000073 and MP_000064 (human)), one CD36 chain (e.g., Genbank Accession Numbers NM_000732, NM_001040651, NP_00732 and NP_001035741 (human)), and two CD3ε chains (e.g., Genbank Accession Numbers NM_000733 and NP_00724 (human)). The chains of CD3 are highly related cell-surface proteins of the immunoglobulin superfamily containing a single extracellular immunoglobulin domain. The CD3 molecule associates with the T-cell receptor (TCR) and 4-chain to form the T-cell receptor (TCR) complex, which functions in generating activation signals in T lymphocytes. Unless expressly indicated otherwise, the reference to CD3 in the application can refer to the CD3 co-receptor, the CD3 co-receptor complex, or any polypeptide chain of the CD3 co-receptor complex.

[0108] CD19: The term “CD19” or “cluster of differentiation 19” refers to the Cluster of Differentiation 19 protein, which is an antigenic determinant detectable on leukemia precursor cells. The human and murine amino acid and nucleic acid sequences can be found in a public database, such as GenBank, UniProt and Swiss-Prot. For example, the amino acid sequence of human CD19 can be found as UniProt/Swiss-Prot Accession No. P15391 and the nucleotide sequence encoding of the human CD19 can be found at Accession No. NM_001178098. CD19 is expressed on most B lineage cancers, including, e.g., acute lymphoblastic leukaemia, chronic lymphocyte leukaemia and non-Hodgkin's lymphoma. Other cells with express CD19 are provided below in the definition of “disease associated with expression of CD19.” It is also an early marker of B cell progenitors. See, e.g., Nicholson et al., 1997, Mol. Immun. 34 (16-17): 1157-1165.

[0109] Chimeric Antibody: The term “chimeric antibody” (or antigen-binding fragment thereof) is an antibody molecule (or antigen-binding fragment thereof) in which (a) the constant region, or a portion thereof, is altered, replaced or exchanged so that the antigen-binding site (variable region) is linked to a constant region of a different or altered class, effector function and/or species, or an entirely different molecule which confers new properties to the chimeric antibody, e.g., an enzyme, toxin, hormone, growth factor, drug, etc.; or (b) the variable region, or a portion thereof, is altered, replaced or exchanged with a variable region having a different or altered antigen specificity. For example, a mouse antibody can be modified by replacing its constant region with the constant region from a human immunoglobulin. Due to the replacement with a human constant region, the chimeric antibody can retain its specificity in recognizing the antigen while having reduced antigenicity in human as compared to the original mouse antibody.

[0110] Chimeric Antigen Receptor: The term “Chimeric Antigen Receptor” or alternatively a “CAR” refers to a set of polypeptides, typically two in the simplest embodiments, which when in an immune effector cell, provides the cell with specificity for a target cell, typically a cancer cell, and with intracellular signal generation. In some embodiments, a CAR comprises at least an extracellular antigen binding domain, a transmembrane domain and a cytoplasmic signaling domain (also referred to herein as “an intracellular signaling domain”) comprising a functional signaling domain derived from a stimulatory molecule and/or costimulatory molecule as defined below. The set of polypeptides can be contiguous or non-contiguous with each other. Where the polypeptides are not contiguous with one another, the set of polypeptides include a dimerization switch that, upon the presence of a dimerization molecule, can couple the polypeptides to one another, e.g., can couple an antigen binding domain to an intracellular signaling domain. CAR molecules are typically administered to a subject by way of administration of immune effector cells (e.g., T cells that are preferably autologous to the subject) engineered to express a CAR molecule.

[0111] In combination: Administered “in combination,” as used herein, means that two (or more) different treatments are delivered to the subject during the course of the subject's affliction with the disorder, e.g., the two or more treatments are delivered after the subject has been diagnosed with the disorder and before the disorder has been cured or eliminated or treatment has ceased for other reasons. The terms “combination” and “in combination” are not limited to the administration of two or more treatments at exactly the same time, but rather it is meant that a pharmaceutical composition comprising an agent (e.g., an anti-CD19 agent) is administered to a subject in a sequence and within a time interval such that the agent can act together with the additional therapy(ies) to provide an increased benefit than if they were administered otherwise.

[0112] Complementarity Determining Region: The terms “complementarity determining region” or “CDR,” as used herein, refer to the sequences of amino acids within antibody variable regions which confer antigen specificity and binding affinity. For example, in general, there are three CDRs in each heavy chain variable region (e.g., CDR-H1, CDR-H2, and CDR-H3) and three CDRs in each light chain variable region (CDR-L1, CDR-L2, and CDR-L3). The precise amino acid sequence boundaries of a given CDR can be determined using any of a number of well-known schemes, including those described by Kabat et al., 1991, “Sequences of Proteins of Immunological Interest,” 5th Ed. Public Health Service, National Institutes of Health, Bethesda, MD (“Kabat” numbering scheme), AI-Lazikani et al., 1997, JMB 273:927-948 (“Chothia” numbering scheme) and ImMunoGenTics (IMGT) numbering (Lefranc, 1999, The Immunologist 7:132-136; Lefranc et al., 2003, Dev. Comp. Immunol. 27:55-77 (“IMGT” numbering scheme). For example, for classic formats, under Kabat, the CDR amino acid residues in the heavy chain variable domain (VH) are numbered 31-35 (CDR-H1), 50-65 (CDR-H2), and 95-102 (CDR-H3); and the CDR amino acid residues in the light chain variable domain (VL) are numbered 24-34 (CDR-L1), 50-56 (CDR-L2), and 89-97 (CDR-L3). Under Chothia, the CDR amino acids in the VH are numbered 26-32 (CDR-H1), 52-56 (CDR-H2), and 95-102 (CDR-H3); and the amino acid residues in VL are numbered 26-32 (CDR-L1), 50-52 (CDR-L2), and 91-96 (CDR-L3). By combining the CDR definitions of both Kabat and Chothia, the CDRs consist of amino acid residues 26-35 (CDR-H1), 50-65 (CDR-H2), and 95-102 (CDR-H3) in human VH and amino acid residues 24-34 (CDR-L1), 50-56 (CDR-L2), and 89-97 (CDR-L3) in human VL. Under IMGT the CDR amino acid residues in the VH are numbered approximately 26-35 (CDR-H1), 51-57 (CDR-H2) and 93-102 (CDR-H3), and the CDR amino acid residues in the VL are numbered approximately 27-32 (CDR-L1), 50-52 (CDR-L2), and 89-97 (CDR-L3) (numbering according to “Kabat”). Under IMGT, the CDR regions of an antibody can be determined using the program IMGT/DomainGap Align.

[0113] Concurrently: The term “concurrently” is not limited to the administration of therapies (e.g., prophylactic or therapeutic agents) at exactly the same time, but rather it is meant that a pharmaceutical composition comprising an antigen-binding molecule of the disclosure is administered to a subject in a sequence and within a time interval such that the molecules can act together with the additional therapy(ies) to provide an increased benefit than if they were administered otherwise.

[0114] Conservative Sequence Modifications: The term “conservative sequence modifications” refers to amino acid modifications that do not significantly affect or alter the binding characteristics of a CD19 binding molecule or a component thereof (e.g., a CD19-binding domain or an Fc region). Such conservative modifications include amino acid substitutions, additions and deletions. Modifications can be introduced into a binding molecule by standard techniques, such as site-directed mutagenesis and PCR-mediated mutagenesis. Conservative amino acid substitutions are ones in which the amino acid residue is replaced with an amino acid residue having a similar side chain. Families of amino acid residues having similar side chains have been defined in the art. These families include amino acids with basic side chains (e.g., lysine, arginine, histidine), acidic side chains (e.g., aspartic acid, glutamic acid), uncharged polar side chains (e.g., glycine, asparagine, glutamine, serine, threonine, tyrosine, cysteine, tryptophan), nonpolar side chains (e.g., alanine, valine, leucine, isoleucine, proline, phenylalanine, methionine), beta-branched side chains (e.g., threonine, valine, isoleucine) and aromatic side chains (e.g., tyrosine, phenylalanine, tryptophan, histidine). Thus, one or more amino acid residues within a binding molecule can be replaced with other amino acid residues from the same side chain family and the altered binding molecule can be tested for, e.g., binding to target molecules and/or effective heterodimerization and/or effector function.

[0115] Diabody: The term “diabody” as used herein refers to small antibody fragments with two antigen-binding sites, typically formed by pairing of scFv chains. Each scFv comprises a heavy chain variable domain (VH) connected to a light chain variable domain (VL) in the same polypeptide chain (VH-VL, where the VH is either N-terminal or C-terminal to the VL). Unlike a typical scFv in which the VH and VL are separated by a linker that allows the VH and VL on the same polypeptide chain to pair and form an antigen-binding domain, diabodies typically comprise a linker that is too short to allow pairing between the VH and VL domains on the same chain, forcing the VH and VL domains to pair with the complementary domains of another chain and create two antigen-binding sites. Diabodies are described more fully in, for example, EP 404,097; WO 93/11161; and Hollinger et al., 1993, Proc. Natl. Acad. Sci. USA 90:6444-6448.

[0116] dsFv: The term “dsFv” refers to disulfide-stabilized Fv fragments. In a dsFv, a VH and VL are connected by an interdomain disulfide bond. To generate such molecules, one amino acid each in the framework region of in VH and VL are mutated to a cysteine, which in turn form a stable interchain disulfide bond. Typically, position 44 in the VH and position 100 in the VL are mutated to cysteines. See Brinkmann, 2010, Antibody Engineering 181-189, DOI:10.1007/978-3-642-01147-4_14. The term dsFv encompasses both what is known as a dsFv (a molecule in which the VH and VL are connected by an interchain disulfide bond but not a linker peptide) or scdsFv (a molecule in which the VH and VL are connected by a linker as well as an interchain disulfide bond).

[0117] Effector Function: The term “effector function” refers to an activity of an antibody molecule that is mediated by binding through a domain of the antibody other than the antigen-binding domain, usually mediated by binding of effector molecules. Effector function includes complement-mediated effector function, which is mediated by, for example, binding of the C1 component of the complement to the antibody. Activation of complement is important in the opsonization and lysis of cell pathogens. The activation of complement also stimulates the inflammatory response and may also be involved in autoimmune hypersensitivity. Effector function also includes Fc receptor (FcR)-mediated effector function, which can be triggered upon binding of the constant domain of an antibody to an Fc receptor (FcR). Binding of antibody to Fc receptors on cell surfaces triggers a number of important and diverse biological responses including engulfment and destruction of antibody-coated particles, clearance of immune complexes, lysis of antibody-coated target cells by killer cells (called antibody-dependent cell-mediated cytotoxicity, or ADCC), release of inflammatory mediators, placental transfer and control of immunoglobulin production. An effector function of an antibody can be altered by altering, e.g., enhancing or reducing, the affinity of the antibody for an effector molecule such as an Fc receptor or a complement component. Binding affinity will generally be varied by modifying the effector molecule binding site, and in this case it is appropriate to locate the site of interest and modify at least part of the site in a suitable way. It is also envisaged that an alteration in the binding site on the antibody for the effector molecule need not alter significantly the overall binding affinity but can alter the geometry of the interaction rendering the effector mechanism ineffective as in non-productive binding. It is further envisaged that an effector function can also be altered by modifying a site not directly involved in effector molecule binding, but otherwise involved in performance of the effector function.

[0118] Epitope: An epitope, or antigenic determinant, is a portion of an antigen recognized by an antibody or other antigen-binding moiety as described herein. An epitope can be linear or conformational.

[0119] Fab: By “Fab” or “Fab region” as used herein is meant a polypeptide region that comprises the VH, CH1, VL, and CL immunoglobulin domain. These terms can refer to this region in isolation, or this region in the context of an antigen-binding molecule of the disclosure.

[0120] Fab domains are formed by association of a CH1 domain attached to a VH domain with a CL domain attached to a VL domain. The VH domain is paired with the VL domain to constitute the Fv region, and the CH1 domain is paired with the CL domain to further stabilize the binding module. A disulfide bond between the two constant domains can further stabilize the Fab domain.

[0121] Fab regions can be produced by proteolytic cleavage of immunoglobulin molecules (e.g., using enzymes such as papain) or through recombinant expression. In native immunoglobulin molecules, Fabs are formed by association of two different polypeptide chains (e.g., VH-CH1 on one chain associates with VL-CL on the other chain). The Fab regions are typically expressed recombinantly, typically on two polypeptide chains, although single chain Fabs are also contemplated herein.

[0122] Fc domain: The term “Fc domain” refers to a pair of associated Fc regions. The two Fc regions dimerize to create the Fc domain. The two Fc regions within the Fc domain can be the same (such an Fc domain being referred to herein as an “Fc homodimer”) or different from one another (such an Fc domain being referred to herein as an “Fc heterodimer”).

[0123] Fc region: The term “Fc region” or “Fc chain” as used herein is meant the polypeptide comprising the CH2-CH3 domains of an IgG molecule, and in some cases, inclusive of the hinge. In EU numbering for human IgG1, the CH2-CH3 domain comprises amino acids 231 to 447, and the hinge is 216 to 230. Thus the definition of “Fc region” includes both (CH2-CH3) or (hinge-CH2-CH3), or fragments thereof. An “Fc fragment” in this context can contain fewer amino acids from either or both of the N- and C-termini but still retains the ability to form a dimer with another Fc region as can be detected using standard methods, generally based on size (e.g., non-denaturing chromatography, size exclusion chromatography).

[0124] Fv: The term “Fv” refers to the minimum antibody fragment derivable from an immunoglobulin that contains a complete target recognition and binding site. This region consists of a dimer of one heavy and one light chain variable domain in a tight, noncovalent association (VH-VL dimer). It is in this configuration that the three CDRs of each variable domain interact to define a target binding site on the surface of the VH-VL dimer. Often, the six CDRs confer target binding specificity to the antibody. However, in some instances even a single variable domain (or half of an Fv comprising only three CDRs specific for a target) can have the ability to recognize and bind target. The reference to a VH-VL dimer herein is not intended to convey any particular configuration. By way of example and not limitation, the VH and VL can come together in any configuration described herein to form a half antibody, or can each be present on a separate half antibody and come together to form an antigen binding domain when the separate half antibodies associate, for example to form a TBM of the disclosure. When present on a single polypeptide chain (e.g., a scFv), the VH and be N-terminal or C-terminal to the VL.

[0125] Half Antibody: The term “half antibody” refers to a molecule that comprises at least one ABM or ABM chain and can associate with another molecule comprising an ABM or ABM chain through, e.g., a disulfide bridge or molecular interactions (e.g., knob-in-hole interactions between Fc heterodimers). A half antibody can be composed of one polypeptide chain or more than one polypeptide chains (e.g., the two polypeptide chains of a Fab). In an embodiment, a half-antibody comprises an Fc region.

[0126] An example of a half antibody is a molecule comprising a heavy and light chain of an antibody (e.g., an IgG antibody). Another example of a half antibody is a molecule comprising a first polypeptide comprising a VL domain and a CL domain, and a second polypeptide comprising a VH domain, a CH1 domain, a hinge domain, a CH2 domain, and a CH3 domain, where the VL and VH domains form an ABM. Yet another example of a half antibody is a polypeptide comprising an scFv domain, a CH2 domain and a CH3 domain.

[0127] A half antibody might include more than one ABM, for example a half-antibody comprising (in N- to C-terminal order) an scFv domain, a CH2 domain, a CH3 domain, and another scFv domain.

[0128] Half antibodies might also include an ABM chain that when associated with another ABM chain in another half antibody forms a complete ABM.

[0129] Thus, a MBM can comprise one, more typically two, or even more than two half antibodies, and a half antibody can comprise one or more ABMs or ABM chains.

[0130] In some MBMs, a first half antibody will associate, e.g., heterodimerize, with a second half antibody. In other MBMs, a first half antibody will be covalently linked to a second half antibody, for example through disulfide bridges or chemical crosslinking. In yet other MBMs, a first half antibody will associate with a second half antibody through both covalent attachments and non-covalent interactions, for example disulfide bridges and knob-in-hole interactions.

[0131] The term “half antibody” is intended for descriptive purposes only and does not connote a particular configuration or method of production. Descriptions of a half antibody as a “first” half antibody, a “second” half antibody, a “left” half antibody, a “right” half antibody or the like are merely for convenience and descriptive purposes.

[0132] Hexavalent: The term “hexavalent” as used herein in the context of an antigen-binding molecule (e.g., a TBM) refers to an antigen-binding molecule that has six antigen-binding domains. Hexavalent TBMs of the disclosure generally have three pairs of antigen-binding domains that each bind to the same antigen, although different configurations (e.g., three antigen-binding domains that bind to CD19, two antigen-binding domains that bind to a component of a TCR complex, and one antigen-binding domain that binds to CD2 or a TAA, or three antigen-binding domains that bind to CD19, two antigen-binding domains that bind to CD2 or a TAA, and one antigen-binding domain that binds to a component of a TCR complex) are within the scope of the disclosure. Examples of hexavalent TBMs are shown schematically in FIGS. 1U-1V.

[0133] Hole: In the context of a knob-into-hole, a “hole” refers to at least one amino acid side chain which is recessed from the interface of a first Fc chain and is therefore positionable in a compensatory “knob” on the adjacent interfacing surface of a second Fc chain so as to stabilize the Fc heterodimer, and thereby favor Fc heterodimer formation over Fc homodimer formation, for example.

[0134] Host cell or recombinant host cell: The terms “host cell” or “recombinant host cell” refer to a cell that has been genetically-engineered, e.g., through introduction of a heterologous nucleic acid. It should be understood that such terms are intended to refer not only to the particular subject cell but to the progeny of such a cell. Because certain modifications can occur in succeeding generations due to either mutation or environmental influences, such progeny may not, in fact, be identical to the parent cell, but are still included within the scope of the term “host cell” as used herein. A host cell can carry the heterologous nucleic acid transiently, e.g., on an extrachromosomal heterologous expression vector, or stably, e.g., through integration of the heterologous nucleic acid into the host cell genome. For purposes of expressing an antigen-binding molecule, a host cell can be a cell line of mammalian origin or mammalian-like characteristics, such as monkey kidney cells (COS, e.g., COS-1, COS-7), HEK293, baby hamster kidney (BHK, e.g., BHK21), Chinese hamster ovary (CHO), NSO, PerC6, BSC-1, human hepatocellular carcinoma cells (e.g., Hep G2), SP2/0, HeLa, Madin-Darby bovine kidney (MDBK), myeloma and lymphoma cells, or derivatives and/or engineered variants thereof. The engineered variants include, e.g., glycan profile modified and/or site-specific integration site derivatives.

[0135] Human Antibody: The term “human antibody” as used herein includes antibodies having variable regions in which both the framework and CDR regions are derived from sequences of human origin. Furthermore, if the antibody contains a constant region, the constant region also is derived from such human sequences, e.g., human germline sequences, or mutated versions of human germline sequences or antibody containing consensus framework sequences derived from human framework sequences analysis, for example, as described in Knappik et al., 2000, J Mol Biol 296, 57-86. The structures and locations of immunoglobulin variable domains, e.g., CDRs, can be defined using well known numbering schemes, e.g., the Kabat numbering scheme, the Chothia numbering scheme, or a combination of Kabat and Chothia (see, e.g., Lazikani et al., 1997, J. Mol. Bio. 273:927 948; Kabat et al., 1991, Sequences of Proteins of Immunological Interest, 5th edit, NIH Publication no. 91-3242 U.S. Department of Health and Human Services; Chothia et al., 1987, J. Mol. Biol. 196:901-917; Chothia et al., 1989, Nature 342:877-883).

[0136] Human antibodies can include amino acid residues not encoded by human sequences (e.g., mutations introduced by random or site-specific mutagenesis in vitro or by somatic mutation in vivo, or a conservative substitution to promote stability or manufacturing). However, the term “human antibody”, as used herein, is not intended to include antibodies in which CDR sequences derived from the germline of another mammalian species, such as a mouse, have been grafted onto human framework sequences.

[0137] Humanized: The term “humanized” forms of non-human (e.g., murine) antibodies are chimeric antibodies that contain minimal sequence derived from non-human immunoglobulin. For the most part, humanized antibodies are human immunoglobulins (recipient antibody) in which residues from a hypervariable region of the recipient are replaced by residues from a hypervariable region of a non-human species (donor antibody) such as mouse, rat, rabbit or non-human primate having the desired specificity, affinity, and capacity. In some instances, framework region (FR) residues of the human immunoglobulin are replaced by corresponding non-human residues. Furthermore, humanized antibodies can comprise residues that are not found in the recipient antibody or in the donor antibody. These modifications are made to further refine antibody performance. In general, the humanized antibody will comprise substantially all of at least one, and typically two, variable domains, in which all or substantially all of the hypervariable loops correspond to those of a non-human immunoglobulin and all or substantially all of the FRs are those of a human immunoglobulin lo sequence. The humanized antibody optionally will also comprise at least a portion of an immunoglobulin constant region (Fc), typically that of a human immunoglobulin. For further details, see Jones et al., 1986, Nature 321:522-525; Riechmann et al., 1988, Nature 332:323-329; and Presta, 1992, Curr. Op. Struct. Biol. 2:593-596. See also the following review articles and references cited therein: Vaswani and Hamilton, 1998, Ann. Allergy, Asthma & Immunol. 1:105-115; Harris, 1995, Biochem. Soc. Transactions 23:1035-1038; Hurle and Gross, 1994, Curr. Op. Biotech. 5:428-433.

[0138] Knob: In the context of a knob-into-hole, a “knob” refers to at least one amino acid side chain which projects from the interface of a first Fc chain and is therefore positionable in a compensatory “hole” in the interface with a second Fc chain so as to stabilize the Fc heterodimer, and thereby favor Fc heterodimer formation over Fc homodimer formation, for example.

[0139] Knobs and holes (or knobs-into-holes): One mechanism for Fc heterodimerization is generally referred to in the art as “knobs and holes”, or “knob-in-holes”, or “knobs-into-holes”. These terms refer to amino acid mutations that create steric influences to favor formation of Fc heterodimers over Fc homodimers, as described in, e.g., Ridgway et al., 1996, Protein Engineering 9(7):617; Atwell et al., 1997, J. Mol. Biol. 270:26; and U.S. Pat. No. 8,216,805. Knob-in-hole mutations can be combined with other strategies to improve heterodimerization, for example as described in Section 7.4.1.6.

[0140] Monoclonal Antibody: The term “monoclonal antibody” as used herein refers to polypeptides, including antibodies, antibody fragments, molecules (including MBMs), etc. that are derived from the same genetic source.

[0141] Monovalent: The term “monovalent” as used herein in the context of an antigen-binding molecule refers to an antigen-binding molecule that has a single antigen-binding domain.

[0142] Multispecific binding molecules: The term “multispecific binding molecules” or “MBMs” refers to molecules that specifically bind to at least two antigens and comprise two or more antigen-binding domains. The antigen-binding domains can each independently be an antibody fragment (e.g., scFv, Fab, nanobody), a ligand, or a non-antibody derived binder (e.g., fibronectin, Fynomer, DARPin).

[0143] Mutation or modification: In the context of the primary amino acid sequence of a polypeptide, the terms “modification” and “mutation” refer to an amino acid substitution, insertion, and/or deletion in the polypeptide sequence relative to a reference polypeptide. Additionally, the term “modification” further encompasses an alteration to an amino acid residue, for example by chemical conjugation (e.g., of a drug or polyethylene glycol moiety) or post-translational modification (e.g., glycosylation).

[0144] Nucleic Acid: The term “nucleic acid” is used herein interchangeably with the term “polynucleotide” and refers to deoxyribonucleotides or ribonucleotides and polymers thereof in either single- or double-stranded form. The term encompasses nucleic acids containing known nucleotide analogs or modified backbone residues or linkages, which are synthetic, naturally occurring, and non-naturally occurring, which have similar binding properties as the reference nucleic acid, and which are metabolized in a manner similar to the reference nucleotides. Examples of such analogs include, without limitation, phosphorothioates, phosphoramidates, methyl phosphonates, chiral-methyl phosphonates, 2-O-methyl ribonucleotides, and peptide-nucleic acids (PNAs).

[0145] Unless otherwise indicated, a particular nucleic acid sequence also implicitly encompasses conservatively modified variants thereof (e.g., degenerate codon substitutions) and complementary sequences, as well as the sequence explicitly indicated. Specifically, as detailed below, degenerate codon substitutions can be achieved by generating sequences in which the third position of one or more selected (or all) codons is substituted with mixed-base and/or deoxyinosine residues (Batzer et al., 1991, Nucleic Acid Res. 19:5081; Ohtsuka et al., 1985, J. Biol. Chem. 260:2605-2608; and Rossolini et al., 1994, Mol. Cell. Probes 8:91-98).

[0146] Operably linked: The term “operably linked” refers to a functional relationship between two or more peptide or polypeptide domains or nucleic acid (e.g., DNA) segments. In the context of a fusion protein or other polypeptide, the term “operably linked” means that two or more amino acid segments are linked so as to produce a functional polypeptide. For example, in the context of an antigen-binding molecule, separate ABMs (or chains of an ABM) can be operably linked through peptide linker sequences. In the context of a nucleic acid encoding a fusion protein, such as a polypeptide chain of an antigen-binding molecule, “operably linked” means that the two nucleic acids are joined such that the amino acid sequences encoded by the two nucleic acids remain in-frame. In the context of transcriptional regulation, the term refers to the functional relationship of a transcriptional regulatory sequence to a transcribed sequence. For example, a promoter or enhancer sequence is operably linked to a coding sequence if it stimulates or modulates the transcription of the coding sequence in an appropriate host cell or other expression system.

[0147] Pentavalent: The term “pentavalent” as used herein in the context of an antigen-binding molecule (e.g., a TBM) refers to an antigen-binding molecule that has five antigen-binding domains. Pentavalent TBMs of the disclosure generally have either (a) two pairs of antigen-binding domains that each bind to the same antigen and a single antigen-binding domain that binds to the third antigen or (b) three antigen-binding domains that bind to the same antigen and two antigen-binding domains that each bind to a separate antigen. An example of a pentavalent TBM is shown schematically in FIG. 1T.

[0148] Polypeptide and Protein: The terms “polypeptide” and “protein” are used interchangeably herein to refer to a polymer of amino acid residues. The terms encompass amino acid polymers in which one or more amino acid residue is an artificial chemical mimetic of a corresponding naturally occurring amino acid, as well as to naturally occurring amino acid polymers and non-naturally occurring amino acid polymer. Additionally, the terms encompass amino acid polymers that are derivatized, for example, by synthetic derivatization of one or more side chains or termini, glycosylation, PEGylation, circular permutation, cyclization, linkers to other molecules, fusion to proteins or protein domains, and addition of peptide tags or labels.

[0149] Recognize: The term “recognize” as used herein refers to an ABM that finds and interacts (e.g., binds) with its epitope.

[0150] Sequence Identity: Sequence identity between two similar sequences (e.g., antibody variable domains) can be measured by algorithms such as that of Smith, T. F. & Waterman, M. S. (1981) “Comparison Of Biosequences,” Adv. Appl. Math. 2:482 [ocal homology algorithm]; Needleman, S. B. & Wunsch, C D. (1970) “A General Method Applicable To The Search For Similarities In The Amino Acid Sequence Of Two Proteins,” J. Mol. Biol. 48:443 [homology alignment algorithm], Pearson, W. R. & Lipman, D. J. (1988) “Improved Tools For Biological Sequence Comparison,” Proc. Natl. Acad. Sci. (U.S.A.) 85:2444 [search for similarity method]; or Altschul, S. F. et al, 1990, “Basic Local Alignment Search Tool,” J. Mol. Biol. 215:403-10, the “BLAST” algorithm, see blast.ncbi.nlm.nih.gov/Blast.cgi. When using any of the aforementioned algorithms, the default parameters (for Window length, gap penalty, etc.) are used. In one embodiment, sequence identity is done using the BLAST algorithm, using default parameters.

[0151] Optionally, the identity is determined over a region that is at least about 50 nucleotides (or, in the case of a peptide or polypeptide, at least about 10 amino acids) in length, or in some cases over a region that is 100 to 500 or 1000 or more nucleotides (or 20, 50, 200 or more amino acids) in length. In some embodiments, the identity is determined over a defined domain, e.g., the VH or VL of an antibody. Unless specified otherwise, the sequence identity between two sequences is determined over the entire length of the shorter of the two sequences.

[0152] Single Chain Fab or scFab: The terms “single chain Fab” and “scFab” mean a polypeptide comprising an antibody heavy chain variable domain (VH), an antibody constant domain 1 (CH1), an antibody light chain variable domain (VL), an antibody light chain constant domain (CL) and a linker, such that the VH and VL are in association with one another and the CH1 and CL are in association with one another. In some embodiments, the antibody domains and the linker have one of the following orders in N-terminal to C-terminal direction: a) VH-CH1-linker-VL-CL, b) VL-CL-linker-VH-CH1, c) VH-CL-linker-VL-CH1 or d) VL-CH1-linker-VH-CL. The linker can be a polypeptide of at least 30 amino acids, for example between 32 and 50 amino acids. The single chain Fabs are stabilized via the natural disulfide bond between the CL domain and the CH1 domain.

[0153] Single Chain Fv or scFv: The term “single-chain Fv” or “scFv” as used herein refers to antibody fragments that comprise the VH and VL domains of an antibody, where these domains are present in a single polypeptide chain. The Fv polypeptide can further comprise a polypeptide linker between the VH and VL domains which enables the scFv to form the desired structure for antigen-binding. For a review of scFv see Plückthun in The Pharmacology of Monoclonal Antibodies, vol. 113, Rosenburg and Moore eds., 1994, Springer-Verlag, New York, pp. 269-315.

[0154] Specifically (or selectively) binds: The term “specifically (or selectively) binds” to an antigen or an epitope refers to a binding reaction that is determinative of the presence of a cognate antigen or an epitope in a heterogeneous population of proteins and other biologics. The binding reaction can be but need not be mediated by an antibody or antibody fragment, but can also be mediated by, for example, any type of ABM described in Section 7.3, such as a ligand, a DARPin, etc. An ABM typically also has a dissociation rate constant (KD) (koff/kon) of less than 5×10⁻²M, less than 10⁻²M, less than 5×10⁻³M, less than 10⁻⁶ M, less than 5×10⁻⁴M, less than 10⁻⁴M, less than 5×10⁻⁵M, less than 10⁻⁵ M, less than 5×10⁻³ M, less than 10⁻⁴M, less than 5×10⁻⁷M, less than 10⁻⁷M, less than 5×10⁻⁸M, less than 10⁻⁸ M, less than 5×10⁻⁹ M, or less than 10⁻⁹ M, and binds to the target antigen with an affinity that is at least two-fold greater than its affinity for binding to a non-specific antigen (e.g., HSA). Binding affinity can be measured using a Biacore, SPR or BLI assay. The term “specifically binds” does not exclude cross-species reactivity. For example, an antigen-binding module (e.g., an antigen-binding fragment of an antibody) that “specifically binds” to an antigen from one species can also “specifically bind” to that antigen in one or more other species. Thus, such cross-species reactivity does not itself alter the classification of an antigen-binding module as a “specific” binder. In certain embodiments, an antigen-binding module that specifically binds to a human antigen has cross-species reactivity with one or more non-human mammalian species, e.g., a primate species (including but not limited to one or more of Macaca fascicularis, Macaca mulatta, and Macaca nemestrina) or a rodent species, e.g., Mus musculus. In other embodiments, the antigen-binding module does not have cross-species reactivity.

[0155] Subject: The term “subject” includes human and non-human animals. Non-human animals include all vertebrates, e.g., mammals and non-mammals, such as non-human primates, sheep, dog, cow, chickens, amphibians, and reptiles. Except when noted, the terms “patient” or “subject” are used herein interchangeably.

[0156] Tandem of VH Domains: The term “a tandem of VH domains (or VHs)” as used herein refers to a string of VH domains, consisting of multiple numbers of identical VH domains of an antibody. Each of the VH domains, except the last one at the end of the tandem, has its C-terminus connected to the N-terminus of another VH domain with or without a linker. A tandem has at least 2 VH domains, and in particular embodiments an antigen-binding molecule has 3, 4, 5, 6, 7, 8, 9, or 10 VH domains. The tandem of VH can be produced by joining the encoding nucleic acids of each VH domain in a desired order using recombinant methods with or without a linker (e.g., as described in Section 7.4.3) that enables them to be made as a single polypeptide chain. The N-terminus of the first VH domain in the tandem is defined as the N-terminus of the tandem, while the C-terminus of the last VH domain in the tandem is defined as the C-terminus of the tandem.

[0157] Tandem of VL Domains: The term “a tandem of VL domains (or VLs)” as used herein refers to a string of VL domains, consisting of multiple numbers of identical VL domains of an antibody. Each of the VL domains, except the last one at the end of the tandem, has its C-terminus connected to the N-terminus of another VL with or without a linker. A tandem has at least 2 VL domains, and in particular embodiments an antigen-binding molecule has 3, 4, 5, 6, 7, 8, 9, or 10 VL domains. The tandem of VL can be produced by joining the encoding nucleic acids of each VL domain in a desired order using recombinant methods with or without a linker (e.g., as described in Section 7.4.3) that enables them to be made as a single polypeptide chain. The N-terminus of the first VL domain in the tandem is defined as the N-terminus of the tandem, while the C-terminus of the last VL domain in the tandem is defined as the C-terminus of the tandem.

[0158] Target Antigen: By “target antigen” as used herein is meant the molecule that is bound non-covalently, reversibly and specifically by an antigen binding domain.

[0159] Tetravalent: The term “tetravalent” as used herein in the context of an antigen-binding molecule (e.g., a BBM or TBM) refers to an antigen-binding molecule that has four antigen-binding domains. Tetravalent TBMs of the disclosure generally have two antigen-binding domains that bind to the same antigen (e.g., CD19) and two antigen-binding domains that each bind to a separate antigen (e.g., a component of a TCR complex and either CD2 or a TAA). Examples of tetravalent BBMs are shown schematically in FIGS. 1AA-1AH and examples of tetravalent TBMs are shown schematically in FIGS. 2Q-2S.

[0160] Therapeutically effective amount: A “therapeutically effective amount” refers to an amount effective, at dosages and for periods of time necessary, to achieve a desired therapeutic result.

[0161] Treat, Treatment, Treating: As used herein, the terms “treat”, “treatment” and “treating” refer to the reduction or amelioration of the progression, severity and/or duration of a disease or disorder (e.g., a proliferative disorder), or the amelioration of one or more symptoms (e.g., one or more discemible symptoms) of a disorder resulting from the administration of one or more CD19 binding molecules of the disclosure. In some embodiments, the terms “treat”, “treatment” and “treating” refer to the amelioration of at least one measurable physical parameter of a disorder, such as growth of a tumor, not necessarily discemible by the patient. In other embodiments the terms “treat”, “treatment” and “treating” refer to the inhibition of the progression of a disorder, either physically by, e.g., stabilization of a discernible symptom, physiologically by, e.g., stabilization of a physical parameter, or both. In some embodiments, the terms “treat”, “treatment” and “treating” can refer to the reduction or stabilization of tumor size or cancerous cell count.

[0162] Trispecific binding molecules: The term “trispecific binding molecules” or “TBMs” refers to molecules that specifically bind to three antigens and comprise three or more antigen-binding domains. The TBMs of the disclosure comprise at least one antigen-binding domain which is specific for CD19, at least one antigen-binding domain which is specific for a component of a TCR complex, and at least one antigen-binding domain which is specific for CD2 or a TAA. The antigen-binding domains can each independently be an antibody fragment (e.g., scFv, Fab, nanobody), a ligand, or a non-antibody derived binder (e.g., fibronectin, Fynomer, DARPin). Representative TBMs are illustrated in FIG. 1. TBMs can comprise one, two, three, four or even more polypeptide chains. For example, the TBM illustrated in FIG. 1M comprises a single polypeptide chain comprising three scFvs connected by ABM linkers one a single polypeptide chain. The TBM illustrated in FIG. 1K comprises two polypeptide chains comprising three scFvs connected by, inter alia, an Fc domain. The TBM illustrated in FIG. 1J comprises three polypeptide chains forming an scFv, a ligand, and a Fab connected by, inter alia, an Fc domain. The TBM illustrated in FIG. 1C comprises four polypeptide chains forming three Fabs connected by, inter alia, an Fc domain. The TBM illustrated in FIG. 1U comprises 6 polypeptide chains forming four Fabs and two scFvs connected by, inter alia, an Fc domain.

[0163] Trivalent: The term “trivalent” as used herein in the context of an antigen-binding molecule (e.g., a MBM) refers to an antigen-binding molecule that has three antigen-binding domains. The MBMs of the disclosure are typically bispecific or trispecific. Bispecific BBMs specifically bind to CD19 and a component of a TCR complex. Trispecific TBMs specifically bind to CD19, a component of a TCR complex, and CD2 or a TAA. Accordingly, the trivalent BBMs have three antigen binding domains, two of which bind to CD19 and one of which binds to a component of the TCR, or vice versa. TBMs have three antigen-binding domains that each bind to a different antigen. Examples of trivalent BBMs are shown schematically in FIGS. 1G-1Z and examples of trivalent TBMs are shown schematically in FIGS. 2B-2V.

[0164] Tumor: The term “tumor” is used interchangeably with the term “cancer” herein, e.g., both terms encompass solid and liquid, e.g., diffuse or circulating, tumors. As used herein, the term “cancer” or “tumor” includes premalignant, as well as malignant cancers and tumors.

[0165] Tumor-Associated Antigen: The term “tumor-associated antigen” or “TAA” refers to a molecule (typically a protein, carbohydrate, lipid or some combination thereof) that is expressed on the surface of a cancer cell, either entirely or as a fragment (e.g., MHC/peptide), and which is useful for the preferential targeting of a pharmacological agent to the cancer cell. In some embodiments, a TAA is a marker expressed by both normal cells and cancer cells, e.g., a lineage marker, e.g., CD19 on B cells. In some embodiments, a TAA is a cell surface molecule that is overexpressed in a cancer cell in comparison to a normal cell, for instance, 1-fold over expression, 2-fold overexpression, 3-fold overexpression or more in comparison to a normal cell. In some embodiments, a TAA is a cell surface molecule that is inappropriately synthesized in the cancer cell, for instance, a molecule that contains deletions, additions or mutations in comparison to the molecule expressed on a normal cell. In some embodiments, a TAA will be expressed exclusively on the cell surface of a cancer cell, entirely or as a fragment (e.g., MHC/peptide), and not synthesized or expressed on the surface of a normal cell. Accordingly, the term “TAA” encompasses antigens that are specific to cancer cells, sometimes referred to as tumor-specific antigens (“TSAs”). Although CD19 has features of a tumor-associated antigen, the terms “tumor-associated antigen” and “TAA” are used throughout the disclosure to refer to molecules other than CD19.

[0166] Variable region: By “variable region” or “variable domain” as used herein is meant the region of an immunoglobulin that comprises one or more Ig domains substantially encoded by any of the Vκ, Vλ, and/or VH genes that make up the kappa, lambda, and heavy chain immunoglobulin genetic loci respectively, and contains the CDRs that confer antigen specificity. A “variable heavy domain” can pair with a “variable light domain” to form an antigen binding domain (“ABD”) or antigen-binding module (“ABM”). In addition, each variable domain comprises three hypervariable regions (“complementary determining regions,” “CDRs”) (CDR-H1, CDR-H2, CDR-H3 for the variable heavy domain and CDR-L1, CDR-L2, CDR-L3 for the variable light domain) and four framework (FR) regions, arranged from amino-terminus to carboxy-terminus in the following order: FR1-CDR1-FR2-CDR2-FR3-CDR3-FR4.

[0167] Vector: The term “vector” is intended to refer to a polynucleotide molecule capable of transporting another polynucleotide to which it has been linked. One type of vector is a “plasmid”, which refers to a circular double stranded DNA loop into which additional DNA segments can be ligated. Another type of vector is a viral vector, where additional DNA segments can be ligated into the viral genome. Certain vectors are capable of autonomous replication in a host cell into which they are introduced (e.g., bacterial vectors having a bacterial origin of replication and episomal mammalian vectors). Other vectors (e.g., non-episomal mammalian vectors) can be integrated into the genome of a host cell upon introduction into the host cell, and thereby are replicated along with the host genome. Moreover, certain vectors are capable of directing the expression of genes to which they are operably linked. Such vectors are referred to herein as “recombinant expression vectors” (or simply, “expression vectors”). In general, expression vectors of utility in recombinant DNA techniques are often in the form of plasmids. In the present specification, “plasmid” and “vector” can be used interchangeably as the plasmid is the most commonly used form of vector. However, the disclosure is intended to include such other forms of expression vectors, such as viral vectors (e.g., replication defective retroviruses, adenoviruses and adeno-associated viruses), which serve equivalent functions.

[0168] VH: The term “VH” refers to the variable region of an immunoglobulin heavy chain of an antibody, including the heavy chain of an Fv, scFv, dsFv or Fab.

[0169] VL: The term “VL” refers to the variable region of an immunoglobulin light chain, including the light chain of an Fv, scFv, dsFv or Fab.

[0170] VH-VL or VH-VL Pair: In reference to a VH-VL pair, whether on the same polypeptide chain or on different polypeptide chains, the terms “VH-VL” and “VH-VL pair” are used for convenience and are not intended to convey any particular orientation, unless the context dictates otherwise. Thus, a scFv comprising a “VH-VL” or “VH-VL pair” can have the VH and VL domains in any orientation, for example the VH N-terminal to the VL or the VL N-terminal to the VH.

### 7.2. CD19 Binding Molecules

[0171] In one aspect, the disclosure provides CD19 binding molecules, including monospecific and multispecific molecules that bind to human CD19. Typically, the CD19 binding molecules of the disclosure comprise a Fc domain comprising a first variant human IgG1 Fc region and a second variant human IgG1 Fc region having L234A, L235A, and G237A (“LALAGA”) substitutions, L234A, L235A, S267K, and P329A (“LALASKPA”) substitutions, D265A, P329A, and S267K (“DAPASK”) substitutions, G237A, D265A, and P329A (“GADAPA”) substitutions, G237A, D265A, P329A, and S267K (“GADAPASK”) substitutions, L234A, L235A, and P329G (“LALAPG”) substitutions, or L234A, L235A, and P329A (“LALAPA”) substitutions.

[0172] In some embodiments, the CD19 binding molecule is a monospecific binding molecule. For example, the monospecific binding molecule can be an antibody or an antigen-binding fragment thereof (e.g., an antibody fragment, an scFv, a dsFv, a Fv, a Fab, an scFab, a (Fab′)2, or a single domain antibody (SDAB). In other embodiments, the CD19 binding molecule is a multispecific (e.g., bispecific) CD19 binding molecule (e.g., a bispecific antibody).

[0173] In some embodiments, the CD19 binding molecules are chimeric or humanized monoclonal antibodies. Chimeric and/or humanized antibodies, can be engineered to minimize the immune response by a human patient to antibodies produced in non-human subjects or derived from the expression of non-human antibody genes. Chimeric antibodies comprise a non-human animal antibody variable region and a human antibody constant region. Such antibodies retain the epitope binding specificity of the original monoclonal antibody, but can be less immunogenic when administered to humans, and therefore more likely to be tolerated by the patient. For example, one or all (e.g., one, two, or three) of the variable regions of the light chain(s) and/or one or all (e.g., one, two, or three) of the variable regions the heavy chain(s) of a mouse antibody (e.g., a mouse monoclonal antibody) can each be joined to a human constant region, such as, without limitation an IgG1 human constant region. Chimeric monoclonal antibodies can be produced by known recombinant DNA techniques. For example, a gene encoding the constant region of a non-human antibody molecule can be substituted with a gene encoding a human constant region (see Robinson et al., PCT Patent Publication PCT/US86/02269; Akira, et al., European Patent Application 184,187; or Taniguchi, M., European Patent Application 171,496). In addition, other suitable techniques that can be used to generate chimeric antibodies are described, for example, in U.S. Pat. Nos. 4,816,567; 4,978,775; 4,975,369; and 4,816,397.

[0174] Chimeric or humanized antibodies and antigen binding fragments thereof of the present disclosure can be prepared based on the sequence of a murine monoclonal antibody. DNA encoding the heavy and light chain immunoglobulins can be obtained from a murine hybridoma of interest and engineered to contain non-murine (e.g., human) immunoglobulin sequences using standard molecular biology techniques. For example, to create a chimeric antibody, the murine variable regions can be linked to human constant regions using known methods (see e.g., U.S. Pat. No. 4,816,567 to Cabilly et al.). To create a humanized antibody, the murine CDR regions can be inserted into a human framework using known methods. See e.g., U.S. Pat. No. 5,225,539 to Winter, and U.S. Pat. Nos. 5,530,101; 5,585,089; 5,693,762 and 6,180,370 to Queen et al.

[0175] A humanized antibody can be produced using a variety of known techniques, including but not limited to, CDR-grafting (see, e.g., European Patent No. EP 239,400; International Publication No. WO 91/09967; and U.S. Pat. Nos. 5,225,539, 5,530,101, and 5,585,089), veneering or resurfacing (see, e.g., European Patent Nos. EP 592,106 and EP 519,596; Padlan, 1991, Molecular Immunology, 28(4/5):489-498; Studnicka et al., 1994, Protein Engineering, 7(6):805-814; and Roguska et al., 1994, PNAS, 91:969-973), chain shuffling (see, e.g., U.S. Pat. No. 5,565,332), and techniques disclosed in, e.g., U.S. Patent Application Publication No. US2005/0042664, U.S. Patent Application Publication No. US2005/0048617, U.S. Pat. Nos. 6,407,213, 5,766,886, International Publication No. WO 9317105, Tan et al., J. Immunol., 169:1119-25 (2002), Caldas et al., Protein Eng., 13(5):353-60 (2000), Morea et al., Methods, 20(3):267-79 (2000), Baca et al., J. Biol. Chem., 272(16):10678-84 (1997), Roguska et al., Protein Eng., 9(10):895-904 (1996), Couto et al., Cancer Res., 55 (23 Supp):5973s-5977s (1995), Couto et al., Cancer Res., 55(8):1717-22 (1995), Sandhu J S, Gene, 150(2):409-10 (1994), and Pedersen et al., J. Mol. Biol., 235(3):959-73 (1994). Often, framework residues in the framework regions will be substituted with the corresponding residue from the CDR donor antibody to alter, for example improve, antigen binding. These framework substitutions, e.g., conservative substitutions are identified by known methods, e.g., by modeling of the interactions of the CDR and framework residues to identify framework residues important for antigen binding and sequence comparison to identify unusual framework residues at particular positions. (See, e.g., Queen et al., U.S. Pat. No. 5,585,089; and Riechmann et al., 1988, Nature, 332:323).

[0176] As provided herein, humanized antibodies or antibody fragments can comprise one or more CDRs from nonhuman immunoglobulin molecules and framework regions where the amino acid residues comprising the framework are derived completely or mostly from human germline. Multiple techniques for humanization of antibodies or antibody fragments are well-known and can essentially be performed following the method of Winter and co-workers (Jones et al., Nature, 321:522-525 (1986); Riechmann et al., Nature, 332:323-327 (1988); Verhoeyen et al., Science, 239:1534-1536 (1988)), by substituting rodent CDRs or CDR sequences for the corresponding sequences of a human antibody, i.e., CDR-grafting (EP 239,400; PCT Publication No. WO 91/09967; and U.S. Pat. Nos. 4,816,567; 6,331,415; 5,225,539; 5,530,101; 5,585,089; 6,548,640). In such humanized antibodies and antibody fragments, substantially less than an intact human variable domain has been substituted by the corresponding sequence from a nonhuman species. Humanized antibodies are often human antibodies in which some CDR residues and possibly some framework (FR) residues are substituted by residues from analogous sites in rodent antibodies. Humanization of antibodies and antibody fragments can also be achieved by veneering or resurfacing (EP 592,106; EP 519,596; Padlan, 1991, Molecular Immunology, 28(4/5):489-498; Studnicka et al., Protein Engineering, 7(6):805-814 (1994); and Roguska et al., PNAS, 91:969-973 (1994)) or chain shuffling (U.S. Pat. No. 5,565,332).

[0177] The choice of human variable domains, both light and heavy, to be used in making the humanized antibodies is to reduce antigenicity. According to the so-called “best-fit” method, the sequence of the variable domain of a rodent antibody is screened against the entire library of known human variable-domain sequences. The human sequence which is closest to that of the rodent is then accepted as the human framework (FR) for the humanized antibody (Sims et al., J. Immunol., 151:2296 (1993); Chothia et al., J. Mol. Biol., 196:901 (1987)). Another method uses a particular framework derived from the consensus sequence of all human antibodies of a particular subgroup of light or heavy chains. The same framework can be used for several different humanized antibodies (see, e.g., Nicholson et al. Mol. Immun. 34 (16-17): 1157-1165 (1997); Carter et al., Proc. Natl. Acad. Sci. USA, 89:4285 (1992); Presta et al., J. Immunol., 151:2623 (1993). In some embodiments, the framework region, e.g., all four framework regions, of the heavy chain variable region are derived from a VH4_4-59 germline sequence. In one embodiment, the framework region can comprise, one, two, three, four or five modifications, e.g., substitutions, e.g., conservative substitutions, e.g., from the amino acid at the corresponding murine sequence. In one embodiment, the framework region, e.g., all four framework regions of the light chain variable region are derived from a VK3_1.25 germline sequence. In one embodiment, the framework region can comprise, one, two, three, four or five modifications, e.g., substitutions, e.g., conservative substitutions, e.g., from the amino acid at the corresponding murine sequence.

[0178] In certain embodiments, the CD19 binding molecules comprise a heavy chain variable region from a particular germline heavy chain immunoglobulin gene and/or a light chain variable region from a particular germline light chain immunoglobulin gene. For example, such antibodies can comprise or consist of a human antibody comprising heavy or light chain variable regions that are “the product of” or “derived from” a particular germline sequence. A human antibody that is “the product of” or “derived from” a human germline immunoglobulin sequence can be identified as such by comparing the amino acid sequence of the human antibody to the amino acid sequences of human germline immunoglobulins and selecting the human germline immunoglobulin sequence that is closest in sequence (i.e., greatest % identity) to the sequence of the human antibody (using the methods outlined herein). A human antibody that is “the product of” or “derived from” a particular human germline immunoglobulin sequence can contain amino acid differences as compared to the germline sequence, due to, for example, naturally-occurring somatic mutations or intentional introduction of site-directed mutation. However, a humanized antibody typically is at least 90% identical in amino acids sequence to an amino acid sequence encoded by a human germline immunoglobulin gene and contains amino acid residues that identify the antibody as being derived from human sequences when compared to the germline immunoglobulin amino acid sequences of other species (e.g., murine germline sequences). In certain cases, a humanized antibody can be at least 95, 96, 97, 98 or 99%, or even at least 96%, 97%, 98%, or 99% identical in amino acid sequence to the amino acid sequence encoded by the germline immunoglobulin gene. Typically, a humanized antibody derived from a particular human germline sequence will display no more than 10-20 amino acid differences from the amino acid sequence encoded by the human germline immunoglobulin gene (prior to the introduction of any skew, pl and ablation variants herein; that is, the number of variants is generally low, prior to the introduction of the variants of the disclosure). In certain cases, the humanized antibody can display no more than 5, or even no more than 4, 3, 2, or 1 amino acid difference from the amino acid sequence encoded by the germline immunoglobulin gene (again, prior to the introduction of any skew, pl and ablation variants herein; that is, the number of variants is generally low, prior to the introduction of the variants of the disclosure).

[0179] In one embodiment, the parent antibody has been affinity matured. Structure-based methods can be employed for humanization and affinity maturation, for example as described in U.S. Ser. No. 11/004,590. Selection based methods can be employed to humanize and/or affinity mature antibody variable regions, including but not limited to methods described in Wu et al., 1999, J. Mol. Biol. 294:151-162; Baca et al., 1997, J. Biol. Chem. 272(16):10678-10684; Rosok et al., 1996, J. Biol. Chem. 271(37): 22611-22618; Rader et al., 1998, Proc. Natl. Acad. Sci. USA 95: 8910-8915; Krauss et al., 2003, Protein Engineering 16(10):753-759. Other humanization methods can involve the grafting of only parts of the CDRs, including but not limited to methods described in U.S. Ser. No. 09/810,510; Tan et al., 2002, J. Immunol. 169:1119-1125; De Pascalis et al., 2002, J. Immunol. 169:3076-3084.

[0180] In some embodiments, the CD19 binding molecule comprises an ABM which is a Fab. Fab domains can be produced by proteolytic cleavage of immunoglobulin molecules, using enzymes such as papain, or through recombinant expression. Fab domains typically comprise a CH1 domain attached to a VH domain which pairs with a CL domain attached to a VL domain. In a wild-type immunoglobulin, the VH domain is paired with the VL domain to constitute the Fv region, and the CH1 domain is paired with the CL domain to further stabilize the binding module. A disulfide bond between the two constant domains can further stabilize the Fab domain.

[0181] In some embodiments, the CD19 binding molecule comprises an ABM which is a scFab. In an embodiment, the antibody domains and the linker in the scFab fragment have one of the following orders in N-terminal to C-terminal direction: a) VH-CH1-linker-VL-CL, or b) VL-CL-linker-VH-CH1. In some cases, VL-CL-linker-VH-CH1 is used.

[0182] In another embodiment, the antibody domains and the linker in the scFab fragment have one of the following orders in N-terminal to C-terminal direction: a) VH-CL-linker-VL-CH1 or b) VL-CH1-linker-VH-CL.

[0183] Optionally in the scFab fragment, additionally to the natural disulfide bond between the CL-domain and the CH1 domain, also the antibody heavy chain variable domain (VH) and the antibody light chain variable domain (VL) are disulfide stabilized by introduction of a disulfide bond between the following positions: i) heavy chain variable domain position 44 to light chain variable domain position 100, ii) heavy chain variable domain position 105 to light chain variable domain position 43, or iii) heavy chain variable domain position 101 to light chain variable domain position 100 (numbering according to EU index of Kabat).

[0184] Such further disulfide stabilization of scFab fragments is achieved by the introduction of a disulfide bond between the variable domains VH and VL of the single chain Fab fragments. Techniques to introduce unnatural disulfide bridges for stabilization for a single chain Fv are described e.g. in WO 94/029350, Rajagopal et al., 1997, Prot. Engin. 10:1453-59; Kobayashi et al., 1998, Nuclear Medicine & Biology, 25:387-393; and Schmidt, et al., 1999, Oncogene 18:1711-1721. In one embodiment, the optional disulfide bond between the variable domains of the scFab fragments is between heavy chain variable domain position 44 and light chain variable domain position 100. In one embodiment, the optional disulfide bond between the variable domains of the scFab fragments is between heavy chain variable domain position 105 and light chain variable domain position 43 (numbering according to EU index of Kabat).

[0185] In some embodiments, the CD19 binding molecule comprises an ABM which is a scFv. Single chain Fv antibody fragments comprise the VH and VL domains of an antibody in a single polypeptide chain, are capable of being expressed as a single chain polypeptide, and retain the specificity of the intact antibody from which it is derived. Generally, the scFv polypeptide further comprises a polypeptide linker between the VH and VL domain that enables the scFv to form the desired structure for target binding. Examples of linkers suitable for connecting the VH and VL chains of an scFV are the ABM linkers identified in Section 7.4.3, for example any of the linkers designated L1 through L58.

[0186] Unless specified, as used herein an scFv can have the VL and VH variable regions in either order, e.g., with respect to the N-terminal and C-terminal ends of the polypeptide, the scFv can comprise VL-linker-VH or can comprise VH-linker-VL.

[0187] To create an scFv-encoding nucleic acid, the VH and VL-encoding DNA fragments are operably linked to another fragment encoding a linker, e.g., encoding any of the linkers described in Section 7.4.3 (such as the amino acid sequence (Gly4^{˜}Ser)3 (SEQ ID NO:53)), such that the VH and VL sequences can be expressed as a contiguous single-chain protein, with the VL and VH regions joined by the flexible linker (see e.g., Bird et al., 1988, Science 242:423-426; Huston et al., 1988, Proc. Natl. Acad. Sci. USA 85:5879-5883; McCafferty et al., 1990, Nature 348:552-554).

[0188] CD19 binding molecules can also comprise an ABM which is a Fv, a dsFv, a (Fab′)2, a single domain antibody (SDAB), a VH or VL domain, or a camelid VHH domain (also called a nanobody).

[0189] CD19 binding molecules can comprise a single domain antibody composed of a single VH or VL domain which exhibits sufficient affinity to CD19. In an embodiment, the single domain antibody is a camelid VHH domain (see, e.g., Riechmann, 1999, Journal of Immunological Methods 231:25-38; WO 94/04678).

[0190] Tables 1A and 1B (collectively “Table 1”) list the sequences of exemplary CD19 binding sequences that can be included in CD19 binding molecules. The sequences set forth in Table 1A are based on the CD19 antibody NEG258.

TABLE 1A
NEG258-Based Binder Sequences

| | | | SEQ |
|---|---|---|---|
| | | | ID |
| Chain | Portion | Sequence | NO: |
| NEG258_ | CDR-H1 | GYTFTTYWIQ | 1 |
| VH | (Combined) | | |
| | CDR-H2 | AVYPGDADTRYTQKFQG | 2 |
| | (Combined) | | |
| | CDR-H3 | DAGLEYYALDY | 3 |
| | (Combined) | | |
| | CDR-H1 | TYWIQ | 4 |
| | (Kabat) | | |
| | CDR-H2 | AVYPGDADTRYTQKFQG | 5 |
| | (Kabat) | | |
| | CDR-H3 | DAGLEYYALDY | 6 |
| | (Kabat) | | |
| | CDR-H1 | GYTFTTY | 7 |
| | (Chothia) | | |
| | CDR-H2 | YPGDAD | 8 |
| | (Chothia) | | |
| | CDR-H3 | DAGLEYYALDY | 9 |
| | (Chothia) | | |
| | CDR-H1 | GYTFTTYW | 10 |
| | (IMGT) | | |
| | CDR-H2 | VYPGDADT | 11 |
| | (IMGT) | | |
| | CDR-H3 | GRDAGLEYYALDY | 12 |
| | (IMGT) | | |
| | VH | QVQLVQSGAEVKKPGASVKVSCK | 13 |
| | | ASGYTFTTYWIQWVRQAPGQRLE | |
| | | WMGAVYPGDADTRYQTQKFGRVT | |
| | | LTADRSASTAYMELSSLRSEDTA | |
| | | VYYCGRDAGLEYYALDYWGQGTL | |
| | | VTVSS | |
| NEG258_ | CDR-L1 | RASQDVGTAVA | 14 |
| VL | (Combined) | | |
| | CDR-L2 | WASTRHT | 15 |
| | (Combined) | | |
| | CDR-L3 | QQYANFPLYT | 16 |
| | (Combined) | | |
| | CDR-L1 | RASQDVGTAVA | 17 |
| | (Kabat) | | |
| | CDR-L2 | WASTRHT | 18 |
| | (Kabat) | | |
| | CDR-L3 | QQYANFPLYT | 19 |
| | (Kabat) | | |
| | CDR-L1 | SQDVGTA | 20 |
| | (Chothia) | | |
| | CDR-L2 | WAS | 21 |
| | (Chothia) | | |
| | CDR-L3 | YANFPLY | 22 |
| | (Chothia) | | |
| | CDR-L1 | QDVGTA | 23 |
| | (IMGT) | | |
| | CDR-L2 | WAS | 24 |
| | (IMGT) | | |
| | CDR-L3 | QQYANFPLYT | 25 |
| | (IMGT) | | |
| | VL | EIVMTQSPATLSVSPGERATLSC | 26 |
| | | RASQDVGTAVAWYQQKPGQAPRL | |
| | | LIYWASTRHTGIPARFSGSGSGT | |
| | | EFTLTISSLQSEDFAVYFCQQYA | |
| | | NFPLYTFGQGTKLEIK | |

[0191] In some embodiments, a CD19 binding molecule comprises CDR-L1, CDR-L-2, CDR-L3, CDR-1H1, CDR-H2 and CDR-H3 sequences of NEG258 as set forth in Table 1A. The CDR-L1, CDR-L-2, CDR-L3, CDR-1H1, CDR-H2 and CDR-H3 sequences can be as defined by Kabat (SEQ ID NOs:17-19 and 4-6, respectively), Chothia (SEQ ID NOs:222 and 7-9, respectively), or IMGT (SEQ ID NOS: 23-25 and 10-12, respectively), or the combined Chothia and Kabat CDR-11, CDR-L2, CDR-13, CDR-11, CDR-H2 and CDR-H3 sequences (SEQ ID NOs:14-16 and 1-3, respectively). The CD19 binding molecule can also comprise a light chain variable sequence (SEQ ID NO:26) and/or heavy chain variable sequence (SEQ ID NO:13) of the anti-CD19 antibody NEG258 as set forth in Table 1A. PGP-22.DNA M

[0192] The sequences set forth in Table 1B are based on the CD19 antibody NEG218.

NEG218-Based Sequences

| | | | SEQ |
|---|---|---|---|
| | | | ID |
| Chain | Portion | Sequence | NO: |
| NEG218_ | CDR-H1 | GYSFTNYWMN | 27 |
| VH | (Combined) | | |
| | CDR-H2 | MIHPSDSEIRLNQKFQG | 28 |
| | (Combined) | | |
| | CDR-H3 | WYYLSSPMDY | 29 |
| | (Combined) | | |
| | CDR-H1 | NYWMN | 30 |
| | (Kabat) | | |
| | CDR-H2 | MIHPSDSEIRLNQKFQG | 31 |
| | (Kabat) | | |
| | CDR-H3 | WYYLSSPMDY | 32 |
| | (Kabat) | | |
| | CDR-H1 | GYSFTNY | 33 |
| | (Chothia) | | |
| | CDR-H2 | HPSDSE | 34 |
| | (Chothia) | | |
| | CDR-H3 | WYYLSSPMDY | 35 |
| | (Chothia) | | |
| | CDR-H1 | GYSFTNYW | 36 |
| | (IMGT) | | |
| | CDR-H2 | IHPSDSEI | 37 |
| | (IMGT) | | |
| | CDR-H3 | SRWYYLSSPMDY | 38 |
| | (IMGT) | | |
| | VH | EVQLVQSGAEVKKPGESLKISCK | 39 |
| | | ASGYSFTNYWMNWVRQMPGKGLE | |
| | | WMGMIHPSDSEIRLNQKFQGQVT | |
| | | LSVDKSIGTAYMQWSSLKASDTA | |
| | | MYYCSRWYYLSSPMDYWGQGTTV | |
| | | TVSS | |
| NEG218_ | CDR-L1 | RASQDVGTAVA | 40 |
| VL | (Combined) | | |
| | CDR-L2 | WASTRHT | 41 |
| | (Combined) | | |
| | CDR-L3 | QQYSSYPYT | 42 |
| | TABLE 1B | | |
| | (Combined) | | |
| | CDR-L1 | RASQDVGTAVA | 43 |
| | (Kabat) | | |
| | CDR-L2 | WASTRHT | 44 |
| | (Kabat) | | |
| | CDR-L3 | QQYSSYPYT | 45 |
| | (Kabat) | | |
| | CDR-L1 | SQDVGTA | 46 |
| | (Chothia) | | |
| | CDR-L2 | WAS | 47 |
| | (Chothia) | | |
| | CDR-L3 | YSSYPY | 48 |
| | (Chothia) | | |
| | CDR-L1 | QDVGTA | 49 |
| | (IMGT) | | |
| | CDR-L2 | WAS | 50 |
| | (IMGT) | | |
| | CDR-L3 | QQYSSYPYT | 51 |
| | (IMGT) | | |
| | VL | EIVMTQSPATLSVSPGERATLSC | 52 |
| | | RASQDVGTAVAWYQQKPGQAPRL | |
| | | LIYWASTRHTGIPARFSGSGSGT | |
| | | EFTLTISSLQSEDFAVYFCQQYS | |
| | | SYPYTFGQGTKLEIK | |

[0193] In some embodiments, a CD19 binding molecule comprises CDR-L1, CDR-L2, CDR-L3, CDR-H1, CDR-H2 and CDR-H3 sequences of NEG218 as set forth in Table 1B. The CDR-L1, CDR-L2, CDR-L3, CDR-H1, CDR-H2 and CDR-H3 sequences can be as defined by Kabat (SEQ ID NOs:43-45 and 30-32, respectively), Chothia (SEQ ID NOs:46-48 and 33-35, respectively), or IMGT (SEQ ID NOs:49-51 and 36-38, respectively), or the combined Chothia and Kabat CDR-L1, CDR-L2, CDR-L3, CDR-H1, CDR-H2 and CDR-H3 sequences (SEQ ID NOs:40-42 and 27-29, respectively). The CD19 binding molecule can also comprise a light chain variable sequence (SEQ ID NO:52) and/or heavy chain variable sequence (SEQ ID NO:39) of the anti-CD19 antibody NEG218 as set forth in Table 1B.

[0194] Other CD19 binding molecules include amino acids that have been mutated, yet have at least 80, 85, 90, 95, 96, 97, 98, or 99 percent identity in the CDR regions with the CDR sequences described in Table 1. In some embodiments, such CD19 binding molecules include mutant amino acid sequences where no more than 1, 2, 3, 4 or 5 amino acids have been mutated in the CDR regions when compared with the CDR sequences described in Table 1.

[0195] Other CD19 binding molecules include VH and/or VL domains comprising amino acid sequences having at least 80, 85, 90, 95, 96, 97, 98, or 99 percent identity to the VH and/or VL sequences described in Table 1. In some embodiments, CD19 binding molecules include VH and/or VL domains where no more than 1, 2, 3, 4 or 5 amino acids have been mutated when compared with the VH and/or VL domains depicted in the sequences described in Table 1, while retaining substantially the same therapeutic activity.

[0196] The CD19 binding molecules can be fused or chemically conjugated (including both covalent and non-covalent conjugations) to a heterologous protein or polypeptide (or fragment thereof, for example to a polypeptide of at least 10, at least 20, at least 30, at least 40, at least 50, at least 60, at least 70, at least 80, at least 90 or at least 100 amino acids). For example, a CD19 binding molecule can be fused directly or indirectly to a detectable protein, e.g., an enzyme or a fluorescent protein. Methods for fusing or conjugating proteins, polypeptides, or peptides to an antibody or an antibody fragment are known and can be used to fuse or conjugate a protein or polypeptide to a CD19 binding molecule of the disclosure. See, e.g., U.S. Pat. Nos. 5,336,603, 5,622,929, 5,359,046, 5,349,053, 5,447,851, and 5,112,946; European Patent Nos. EP 307,434 and EP 367,166; International Publication Nos. WO 96/04388 and WO 91/06570; Ashkenazi et al., 1991, Proc. Natl. Acad. Sci. USA 88:10535-10539; Zheng et al., 1995, J. Immunol. 154:5590-5600; and Vii et al., 1992, Proc. Natl. Acad. Sci. USA 89:11337-11341.

[0197] Additional CD19 binding molecules can be generated through the techniques of gene-shuffling, motif-shuffling, exon-shuffling, and/or codon-shuffling (collectively referred to as “DNA shuffling”). DNA shuffling can be employed to alter the activities of molecules of the disclosure or fragments thereof (e.g., molecules or fragments thereof with higher affinities and lower dissociation rates). See, generally, U.S. Pat. Nos. 5,605,793, 5,811,238, 5,830,721, 5,834,252, and 5,837,458; Patten et al., 1997, Curr. Opinion Biotechnol. 8:724-33; Harayama, 1998, Trends Biotechnol. 16(2):76-82; Hansson et al., 1999, J. Mol. Biol. 287:265-76; and Lorenzo and Blasco, 1998, Biotechniques 24(2):308-313. The CD19 binding molecules described herein or fragments thereof can be altered by being subjected to random mutagenesis by error-prone PCR, random nucleotide insertion or other methods prior to recombination. A polynucleotide encoding a fragment of a CD19 binding molecule described herein can be recombined with one or more components, motifs, sections, parts, domains, fragments, etc. of one or more heterologous molecules.

[0198] Moreover, CD19 binding molecules can be fused to marker sequences, such as a peptide to facilitate purification. In some embodiments, the marker amino acid sequence is a hexa-histidine peptide (SEQ ID NO: 54), such as the tag provided in a pQE vector (QIAGEN, Inc., 9259 Eton Avenue, Chatsworth, CA, 91311), among others, many of which are commercially available. As described in Gentz et al., 1989, Proc. Natl. Acad. Sci. USA 86:821-824, for instance, hexa-histidine (SEQ ID NO: 54) provides for convenient purification of the fusion protein. Other peptide tags useful for purification include, but are not limited to, the hemagglutinin (“HA”) tag, which corresponds to an epitope derived from the influenza hemagglutinin protein (Wilson et al., 1984 Cell 37:767), and the “flag” tag.

### 7.3. Antigen Binding Modules of Multispecific Binding Molecules

[0199] Typically, one or more ABMs of the MBMs comprise immunoglobulin-based antigen-binding domains, for example the sequences of antibody fragments or derivatives. These antibody fragments and derivatives typically include the CDRs of an antibody and can include larger fragments and derivatives thereof, e.g., Fabs, scFabs, Fvs, and scFvs.

[0200] Immunoglobulin-based ABMs can comprise modifications to framework residues within a VH and/or a VL, e.g. to improve the properties of a MBM containing the ABM. For example, framework modifications can be made to decrease immunogenicity of a MBM. One approach for making such framework modifications is to “back-mutate” one or more framework residues of the ABM to a corresponding germline sequence. Such residues can be identified by comparing framework sequences to germline sequences from which the ABM is derived. To “match” framework region sequences to desired germline configuration, residues can be “back-mutated” to a corresponding germline sequence by, for example, site-directed mutagenesis. MBMs having such “back-mutated” ABMs are intended to be encompassed by the disclosure.

[0201] Another type of framework modification involves mutating one or more residues within a framework region, or even within one or more CDR regions, to remove T-cell epitopes to thereby reduce potential immunogenicity of a MBM. This approach is also referred to as “deimmunization” and is described in further detail in U.S. Patent Publication 20030153043 by Carr et al.

[0202] ABMs can also be modified to have altered glycosylation, which can be useful, for example, to increase the affinity of a MBM for one or more of its antigens. Such carbohydrate modifications can be accomplished by, for example, altering one or more sites of glycosylation within an ABM sequence. For example, one or more amino acid substitutions can be made that result in elimination of one or more variable region framework glycosylation sites to thereby eliminate glycosylation at that site. Such aglycosylation can increase the affinity of the MBM for an antigen. Such an approach is described in, e.g., U.S. Pat. Nos. 5,714,350 and 6,350,861 by Co et al.

[0203] 7.3.1. Immunoglobulin Based ABMs

[0204] 7.3.1.1. Fabs

[0205] In certain aspects, an ABM is a Fab domain.

[0206] For the MBMs of the disclosure, it is advantageous to use Fab heterodimerization strategies to permit the correct association of Fab domains belonging to the same ABM and minimize aberrant pairing of Fab domains belonging to different ABMs. For example, the Fab heterodimerization strategies shown in Table 2 below can be used:

TABLE 2
Fab Heterodimerization Strategies

| Name | STRATEGY | VH | CH1 | VL | CL | REFERENCE |
|---|---|---|---|---|---|---|
| F1 | CrossMabCH1-CL | WT | CL | WT | CH1 | Schaefer et al., 2011, |
| | | | domain | | domain | Cancer Cell 2011; |
| | | | | | | 20: 472-86; |
| | | | | | | PMID: 22014573. |
| F2 | orthogonal Fab | 39K, 62E | H172A, | 1R, 38D, | L135Y, | Lewis et al., 2014, Nat |
| | VHVRD1CH1CRD2 - | | F174G | (36F) | S176W | Biotechnol 32: 191-8 |
| | VLVRD1CACRD2 | | | | | |
| F3 | orthogonal Fab | 39Y | WT | 38R | WT | Lewis et al., 2014, Nat |
| | VHVRD2CH1wt - | | | | | Biotechnol 32: 191-8 |
| | VLVRD2CAwt | | | | | |
| F4 | TCR CαCβ | 39K | TCR Cα | 38D | TCR Cβ | Wu et al., 2015, MAbs |
| | | | | | | 7: 364-76 |
| F5 | CR3 | WT | T192E | WT | N137K, | Golay at al., 2016, J |
| | | | | | S114A | Immunol 196: 3199-211. |
| F6 | MUT4 | WT | L143Q, | WT | V133T, | Golay at al., 2016, J |
| | | | S188V | | S176V | Immunol 196: 3199-211. |
| F7 | DuetMab | WT | F126C | WT | S121C | Mazor et al., 2015, |
| | | | | | | MAbs 7: 377-89; Mazor |
| | | | | | | et al., 2015, MAbs |
| | | | | | | 7: 461-669. |

[0207] Accordingly, in certain embodiments, correct association between the two polypeptides of a Fab is promoted by exchanging the VL and VH domains of the Fab for each other or exchanging the CH1 and CL domains for each other, e.g., as described in WO 2009/080251.

[0208] Correct Fab pairing can also be promoted by introducing one or more amino acid modifications in the CH1 domain and one or more amino acid modifications in the CL domain of the Fab and/or one or more amino acid modifications in the VH domain and one or more amino acid modifications in the VL domain. The amino acids that are modified are typically part of the VH:VL and CH1:CL interface such that the Fab components preferentially pair with each other rather than with components of other Fabs.

[0209] In one embodiment, the one or amino acid modifications are limited to the conserved framework residues of the variable (VH, VL) and constant (CH1, CL) domains as indicated by the Kabat numbering of residues. Almagro, 2008, Frontiers In Bioscience 13:1619-1633 provides a definition of the framework residues on the basis of Kabat, Chothia, and IMGT numbering schemes.

[0210] In one embodiment, the modifications introduced in the VH and CH1 and/or VL and CL domains are complementary to each other. Complementarity at the heavy and light chain interface can be achieved on the basis of steric and hydrophobic contacts, electrostatic/charge interactions or a combination of the variety of interactions. The complementarity between protein surfaces is broadly described in the literature in terms of lock and key fit, knob into hole, protrusion and cavity, donor and acceptor etc., all implying the nature of structural and chemical match between the two interacting surfaces.

[0211] In one embodiment, the one or more introduced modifications introduce a new hydrogen bond across the interface of the Fab components. In one embodiment, the one or more introduced modifications introduce a new salt bridge across the interface of the Fab components. Exemplary substitutions are described in WO 2014/150973 and WO 2014/082179.

[0212] In some embodiments, the Fab domain comprises a 192E substitution in the CH1 domain and 114A and 137K substitutions in the CL domain, which introduces a salt-bridge between the CH1 and CL domains (see, Golay et al., 2016, J Immunol 196:3199-211).

[0213] In some embodiments, the Fab domain comprises a 143Q and 188V substitutions in the CH1 domain and 113T and 176V substitutions in the CL domain, which serves to swap hydrophobic and polar regions of contact between the CH1 and CL domain (see, Golay et al., 2016, J Immunol 196:3199-211).

[0214] In some embodiments, the Fab domain can comprise modifications in some or all of the VH, CH1, VL, CL domains to introduce orthogonal Fab interfaces which promote correct assembly of Fab domains (Lewis et al., 2014 Nature Biotechnology 32:191-198). In an embodiment, 39K, 62E modifications are introduced in the VH domain, H172A, F174G modifications are introduced in the CH1 domain, 1R, 38D, (36F) modifications are introduced in the VL domain, and L135Y, S176W modifications are introduced in the CL domain. In another embodiment, a 39Y modification is introduced in the VH domain and a 38R modification is introduced in the VL domain.

[0215] Fab domains can also be modified to replace the native CH1:CL disulfide bond with an engineered disulfide bond, thereby increasing the efficiency of Fab component pairing. For example, an engineered disulfide bond can be introduced by introducing a 126C in the CH1 domain and a 121C in the CL domain (see, Mazor et al., 2015, MAbs 7:377-89).

[0216] Fab domains can also be modified by replacing the CH1 domain and CL domain with alternative domains that promote correct assembly. For example, Wu et al., 2015, MAbs 7:364-76, describes substituting the CH1 domain with the constant domain of the a T cell receptor and substituting the CL domain with the P domain of the T cell receptor, and pairing these domain replacements with an additional charge-charge interaction between the VL and VH domains by introducing a 38D modification in the VL domain and a 39K modification in the VH domain.

[0217] ABMs can comprise a single chain Fab fragment, which is a polypeptide consisting of an antibody heavy chain variable domain (VH), an antibody constant domain 1 (CH1), an antibody light chain variable domain (VL), an antibody light chain constant domain (CL) and a linker. In some embodiments, the antibody domains and the linker have one of the following orders in N-terminal to C-terminal direction: a) VH-CH1-linker-VL-CL, b) VL-CL-linker-VH-CH1, c) VH-CL-linker-VL-CH1 or d) VL-CH1-linker-VH-CL. The linker can be a polypeptide of at least 30 amino acids, e.g., between 32 and 50 amino acids. The single chain Fab domains are stabilized via the natural disulfide bond between the CL domain and the CH1 domain.

[0218] In an embodiment, the antibody domains and the linker in the single chain Fab fragment have one of the following orders in N-terminal to C-terminal direction: a) VH-CH1-linker-VL-CL, or b) VL-CL-linker-VH-CH1. In some cases, VL-CL-linker-VH-CH1 is used.

[0219] In another embodiment, the antibody domains and the linker in the single chain Fab fragment have one of the following orders in N-terminal to C-terminal direction: a) VH-CL-linker-VL-CH1 or b) VL-CH1-linker-VH-CL.

[0220] Optionally in the single chain Fab fragment, additionally to the natural disulfide bond between the CL-domain and the CH1 domain, also the antibody heavy chain variable domain (VH) and the antibody light chain variable domain (VL) ABM are disulfide stabilized by introduction of a disulfide bond between the following positions: i) heavy chain variable domain position 44 to light chain variable domain position 100, ii) heavy chain variable domain position 105 to light chain variable domain position 43, or iii) heavy chain variable domain position 101 to light chain variable domain position 100 (numbering according to EU index of Kabat).

[0221] In one embodiment, the optional disulfide bond between the variable domains of the single chain Fab fragments is between heavy chain variable domain position 44 and light chain variable domain position 100. In one embodiment, the optional disulfide bond between the variable domains of the single chain Fab fragments is between heavy chain variable domain position 105 and light chain variable domain position 43 (numbering according to EU index of Kabat).

[0222] 7.3.1.2. scFvs

[0223] In certain aspects, an ABM is a single chain Fv or “scFv”. Examples of linkers suitable for connecting the VH and VL chains of an scFV are the ABM linkers identified in Section 7.4.3, for example any of the linkers designated L1 through L54.

[0224] To create an scFv-encoding nucleic acid, the VH and VL-encoding DNA fragments are operably linked to another fragment encoding a linker, e.g., encoding any of the ABM linkers described in Section 7.4.3 (such as the amino acid sequence (Gly4^{˜}Ser)3 (SEQ ID NO:53)

[0225] 7.3.1.3. Other immunoglobulin-based ABMs

[0226] MBMs can also comprise ABMs having an immunoglobulin format which is other than Fab or scFv, for example Fv, dsFv, (Fab′)2, a single domain antibody (SDAB), a VH or VL domain, or a camelid VHH domain (also called a nanobody).

[0227] An ABM can be a single domain antibody composed of a single VH or VL domain which exhibits sufficient affinity to the target. In an embodiment, the single domain antibody is a camelid VHH domain (see, e.g., Riechmann, 1999, Journal of Immunological Methods 231:25-38; WO 94/04678).

[0228] 7.3.2. Non-Immunoglobulin Based ABM

[0229] In certain embodiments, MBMs comprise one or more of the ABMs derived from non-antibody scaffold proteins (including, but not limited to, designed ankyrin repeat proteins (DARPins), Avimers (short for avidity multimers), Anticalin/Lipocalins, Centyrins, Kunitz domains, Adnexins, Affilins, Affitins (also known as Nonfitins), Knottins, Pronectins, Versabodies, Duocalins, and Fynomers), ligands, receptors, cytokines or chemokines.

[0230] Non-immunoglobulin scaffolds that can be used in the MBMs include those listed in Tables 3 and 4 of Mintz and Crea, 2013, Bioprocess International 11(2):40-48; in FIG. 1, Table 1 and Figure I of Vazquez-Lombardi et al., 2015, Drug Discovery Today 20(10):1271-83; in Table 1 and Box 2 of Skriec et al., 2015, Trends in Biotechnology 33(7):408-18. The contents of Tables 3 and 4 of Mintz and Crea, 2013, Bioprocess International 11(2):40-48; in FIG. 1, Table 1 and Figure I of Vazquez-Lombardi et al., 2015, Drug Discovery Today 20(10):1271-83; in Table 1 and Box 2 of Skriec et al., 2015, Trends in Biotechnology 33(7):408-18 (collectively, “Scaffold Disclosures”). In a particular embodiment, the Scaffold Disclosures are incorporated by reference for what they disclose relating to Adnexins. In another embodiment, the Scaffold Disclosures are incorporated by reference for what they disclose relating to Avimers. In another embodiment, the Scaffold Disclosures are incorporated by reference for what they disclose relating to Affibodies. In yet another embodiment, the Scaffold Disclosures are incorporated by reference for what they disclose relating to Anticalins. In yet another embodiment, the Scaffold Disclosures are incorporated by reference for what they disclose relating to DARPins. In yet another embodiment, the Scaffold Disclosures are incorporated by reference for what they disclose relating to Kunitz domains. In yet another embodiment, the Scaffold Disclosures are incorporated by reference for what they disclose relating to Knottins. In yet another embodiment, the Scaffold Disclosures are incorporated by reference for what they disclose relating to Pronectins. In yet another embodiment, the Scaffold Disclosures are incorporated by reference for what they disclose relating to Nanofitins. In yet another embodiment, the Scaffold Disclosures are incorporated by reference for what they disclose relating to Affilins. In yet another embodiment, the Scaffold Disclosures are incorporated by reference for what they disclose relating to Adnectins. In yet another embodiment, the Scaffold Disclosures are incorporated by reference for what they disclose relating to ABMs. In yet another embodiment, the Scaffold Disclosures are incorporated by reference for what they disclose relating to Adhirons. In yet another embodiment, the Scaffold Disclosures are incorporated by reference for what they disclose relating to Affimers. In yet another embodiment, the Scaffold Disclosures are incorporated by reference for what they disclose relating to Alphabodies. In yet another embodiment, the Scaffold Disclosures are incorporated by reference for what they disclose relating to Armadillo Repeat Proteins. In yet another embodiment, the Scaffold Disclosures are incorporated by reference for what they disclose relating to Atrimers/Tetranectins. In yet another embodiment, the Scaffold Disclosures are incorporated by reference for what they disclose relating to Obodies/OB-folds. In yet another embodiment, the Scaffold Disclosures are incorporated by reference for what they disclose relating to Centyrins. In yet another embodiment, the Scaffold Disclosures are incorporated by reference for what they disclose relating to Repebodies. In yet another embodiment, the Scaffold Disclosures are incorporated by reference for what they disclose relating to Anticalins. In yet another embodiment, the Scaffold Disclosures are incorporated by reference for what they disclose relating to Atrimers. In yet another embodiment, the Scaffold Disclosures are incorporated by reference for what they disclose relating to bicyclic peptides. In yet another embodiment, the Scaffold Disclosures are incorporated by reference for what they disclose relating to cys-knots. In yet another embodiment, the Scaffold Disclosures are incorporated by reference for what they disclose relating to Fn3 scaffolds (including Adnectins, Centryrins, Pronectins, and Tn3).

[0231] In an embodiment, an ABM can be a designed ankyrin repeat protein (“DARPin”). DARPins are antibody mimetic proteins that typically exhibit highly specific and high-affinity target protein binding. They are typically genetically engineered and derived from natural ankyrin proteins and consist of at least three, usually four or five repeat motifs of these proteins. Their molecular mass is about 14 or 18 kDa (kilodaltons) for four- or five-repeat DARPins, respectively. Examples of DARPins can be found, for example in U.S. Pat. No. 7,417,130. Multispecific binding molecules comprising DARPin binding modules and immunoglobulin-based binding modules are disclosed in, for example, U.S. Publication No. 2015/0030596 A1.

[0232] In another embodiment, an ABM can be an Affibody. An Affibody is well known and refers to affinity proteins based on a 58 amino acid residue protein domain, derived from one of the IgG binding domain of staphylococcal protein A.

[0233] In another embodiment, an ABM can be an Anticalin. Anticalins are well known and refer to another antibody mimetic technology, where the binding specificity is derived from Upocalins. Anticalins can also be formatted as dual targeting protein, called Duocalins.

[0234] In another embodiment, an ABM can be a Versabody. Versabodies are well known and refer to another antibody mimetic technology. They are small proteins of 3-5 kDa with >15% cysteines, which form a high disulfide density scaffold, replacing the hydrophobic core of typical proteins.

[0235] Other non-immunoglobulin ABMs include “A” domain oligomers (also known as Avimers) (see for example, U.S. Patent Application Publication Nos. 2005/0164301, 2005/0048512, and 2004/017576), Fn3 based protein scaffolds (see for example, U.S. Patent Application Publication 2003/0170753), VASP polypeptides, Avian pancreatic polypeptide (aPP), Tetranectin (based on CTLD3), Affililin (based on γB-crystallin/ubiquitin), Knottins, SH3 domains, PDZ domains, Tendamistat, Neocarzinostatin, Protein A domains, Lipocalins, Transferrin, or Kunitz domains. In one aspect, ABMs useful in the construction of the MBMs comprise fibronectin-based scaffolds as exemplified in WO 2011/130324.

[0236] Moreover, in certain aspects, an ABM comprises a ligand binding domain of a receptor or a receptor binding domain of a ligand.

### 7.4. Connectors

[0237] It is contemplated that the CD19 binding molecules can in some instances include pairs of ABMs or ABM chains (e.g., the VH-CH1 or VL-CL component of a Fab) connected directly to one another, e.g., as a fusion protein without a linker. For example, the CD19 binding molecules can comprise connector moieties linking individual ABMs or ABM chains. The use of connector moieties can improve target binding, for example by increasing flexibility of the ABMs within a CD19 binding molecule and thus reducing steric hindrance. The ABMs or ABM chains can be connected to one another through, for example, Fc domains (each Fc domain representing a pair of associated Fc regions) and/or ABM linkers. The use of Fc domains will typically require the use of hinge regions as connectors of the ABMs or ABM chains for optimal antigen binding. Thus, the term “connector” encompasses, but is not limited to, Fc regions, Fc domains, and hinge regions.

[0238] Connectors can be selected or modified to, for example, increase or decrease the biological half-life of a CD19 binding molecule. For example, to decrease biological half-life, one or more amino acid mutations can be introduced into a CH2-CH3 domain interface region of an Fc-hinge fragment such that a CD19 binding molecule comprising the fragment has impaired Staphylococcyl Protein A (SpA) binding relative to native Fc-hinge domain SpA binding. This approach is described in further detail in U.S. Pat. No. 6,165,745 by Ward et al. Alternatively, a CD19 binding molecule can be modified to increase its biological half-life. For example, one or more of the following mutations can be introduced: T252L, T254S, T256F, as described in U.S. Pat. No. 6,277,375 to Ward. Alternatively, to increase the biological half-life, a CD19 binding molecule can be altered within a CH1 or CL region to contain a salvage receptor binding epitope taken from two loops of a CH2 domain of an Fc region of an IgG, as described in U.S. Pat. Nos. 5,869,046 and 6,121,022 by Presta et al.

[0239] Examples of Fc domains (formed by the pairing of two Fc regions), hinge regions and ABM linkers are described in Sections 7.4.1, 7.4.2, and 7.4.3, respectively.

[0240] 7.4.1. Fc domains

[0241] The CD19 binding molecules can include an Fc domain derived from any suitable species. In one embodiment, the Fc domain is derived from a human Fc domain.

[0242] The Fc domain can be derived from any suitable class of antibody, including IgA (including subclasses IgA1 and IgA2), IgD, IgE, IgG (including subclasses IgG1, IgG2, IgG3 and IgG4), and IgM. In one embodiment, the Fc domain is derived from IgG1, IgG2, IgG3 or IgG4. In one embodiment, the Fc domain is derived from IgG1. In one embodiment, the Fc domain is derived from IgG4.

[0243] The Fc domain comprises two polypeptide chains, each referred to as a heavy chain Fc region. The two heavy chain Fc regions dimerize to create the Fc domain. The two Fc regions within the Fc domain can be the same or different from one another. In a native antibody the Fc regions are typically identical, but for the purpose of producing multispecific binding molecules of the disclosure, the Fc regions might advantageously be different to allow for heterodimerization, as described in Section 7.4.1.5 below.

[0244] Typically each heavy chain Fc region comprises or consists of two or three heavy chain constant domains.

[0245] In native antibodies, the heavy chain Fc region of IgA, IgD and IgG is composed of two heavy chain constant domains (CH2 and CH3) and that of IgE and IgM is composed of three heavy chain constant domains (CH2, CH3 and CH4). These dimerize to create an Fc domain.

[0246] In the present disclosure, the heavy chain Fc region can comprise heavy chain constant domains from one or more different classes of antibody, for example one, two or three different classes.

[0247] In one embodiment, the heavy chain Fc region comprises CH2 and CH3 domains derived from IgG1. An exemplary sequence of a heavy chain Fc region derived from human IgG1 is given in SEQ ID NO:1109:

(SEQ ID NO: 1109)
DKTHTCPPCPAPELLGGPSVFLFPPKPKDTLMISRTPEVTCVVVDVSHED
PEVKFNWYVDGVEVHNAKTKPREEQYNSTYRVVSVLTVLHQDWLNGKEYK
CKVSNKALPAPIEKTISKAKGQPREPQVYTLPPSRDELTKNQVSLTCLVK
GFYPSDIAVEWESNGQPENNYKTTPPVLDSDGSFFLYSKLTVDKSRWQQG
NVFSCSVMHEALHNHYTQKSLSLSP.

[0248] In some embodiments, a CD19 binding molecule of the disclosure comprises a Fc region whose amino acid sequence comprises the amino acid sequence of SEQ ID NO:1109 modified with one or more of the substitutions described in Section 7.4.1 and its subparts.

[0249] In one embodiment, the heavy chain Fc region comprises CH2 and CH3 domains derived from IgG2.

[0250] In one embodiment, the heavy chain Fc region comprises CH2 and CH3 domains derived from IgG3.

[0251] In one embodiment, the heavy chain Fc region comprises CH2 and CH3 domains derived from IgG4.

[0252] In one embodiment, the heavy chain Fc region comprises a CH4 domain from IgM. The IgM CH4 domain is typically located at the C-terminus of the CH3 domain.

[0253] In one embodiment, the heavy chain Fc region comprises CH2 and CH3 domains derived from IgG and a CH4 domain derived from IgM.

[0254] It will be appreciated that the heavy chain constant domains for use in producing a heavy chain Fc region for the CD19 binding molecules of the present disclosure can include variants of the naturally occurring constant domains described above. Such variants can comprise one or more amino acid variations compared to wild type constant domains. In one example the heavy chain Fc region of the present disclosure comprises at least one constant domain that varies in sequence from the wild type constant domain. It will be appreciated that the variant constant domains can be longer or shorter than the wild type constant domain. For example, the variant constant domains are at least 60% identical or similar to a wild type constant domain. In another example the variant constant domains are at least 70% identical or similar. In another example the variant constant domains are at least 75% identical or similar. In another example the variant constant domains are at least 80% identical or similar. In another example the variant constant domains are at least 85% identical or similar. In another example the variant constant domains are at least 90% identical or similar. In another example the variant constant domains are at least 95% identical or similar. In another example the variant constant domains are at least 99% identical or similar. Exemplary Fc variants are described in Sections 7.4.1.1 through 7.4.1.5, infra.

[0255] IgM and IgA occur naturally in humans as covalent multimers of the common H2L2 antibody unit. IgM occurs as a pentamer when it has incorporated a J-chain, or as a hexamer when it lacks a J-chain. IgA occurs as monomer and dimer forms. The heavy chains of IgM and IgA possess an 18 amino acid extension to the C-terminal constant domain, known as a tailpiece. The tailpiece includes a cysteine residue that forms a disulfide bond between heavy chains in the polymer, and is believed to have an important role in polymerization. The tailpiece also contains a glycosylation site. In certain embodiments, the CD19 binding molecules of the present disclosure do not comprise a tailpiece.

[0256] The Fc domains that are incorporated into the CD19 binding molecules of the present disclosure can comprise one or more modifications that alter one or more functional properties of the proteins, such as serum half-life, complement fixation, Fc receptor binding, and/or antigen-dependent cellular cytotoxicity. Furthermore, a CD19 binding molecule can be chemically modified (e.g., one or more chemical moieties can be attached to the CD19 binding molecule) or be modified to alter its glycosylation, again to alter one or more functional properties of the CD19 binding molecule.

[0257] Effector function of an antibody molecule includes complement-mediated effector function, which is mediated by, for example, binding of the C1 component of the complement to the antibody. Activation of complement is important in the opsonization and direct lysis of pathogens. In addition, it stimulates the inflammatory response by recruiting and activating phagocytes to the site of complement activation. Effector function includes Fc receptor (FcR)-mediated effector function, which can be triggered upon binding of the constant domains of an antibody to an Fc receptor (FcR). Antigen-antibody complex-mediated crosslinking of Fc receptors on effector cell surfaces triggers a number of important and diverse biological responses including engulfment and destruction of antibody-coated particles, clearance of immune complexes, lysis of antibody-coated target cells by killer cells (called antibody-dependent cell-mediated cytotoxicity, or ADCC), release of inflammatory mediators, placental transfer and control of immunoglobulin production.

[0258] Fc regions can be altered by replacing at least one amino acid residue with a different amino acid residue to alter the effector functions. For example, one or more amino acids can be replaced with a different amino acid residue such that the Fc region has an altered affinity for an effector ligand. The effector ligand to which affinity is altered can be, for example, an Fc receptor or the C1 component of complement. This approach is described in, e.g., U.S. Pat. Nos. 5,624,821 and 5,648,260, both by Winter et al. Modified Fc regions can also alter C1q binding and/or reduce or abolish complement dependent cytotoxicity (CDC). This approach is described in, e.g., U.S. Pat. Nos. 6,194,551 by Idusogie et al. Modified Fc regions can also alter the ability of an Fc region to fix complement. This approach is described in, e.g., the PCT Publication WO 94/29351 by Bodmer et al. Allotypic amino acid residues include, but are not limited to, constant region of a heavy chain of the IgG1, IgG2, and IgG3 subclasses as well as constant region of a light chain of the kappa isotype as described by Jefferis et al., 2009, MAbs, 1:332-338.

[0259] Fc regions can also be modified to “silence” the effector function, for example, to reduce or eliminate the ability of a CD19 binding molecule to mediate antibody dependent cellular cytotoxicity (ADCC) and/or antibody dependent cellular phagocytosis (ADCP). This can be achieved, for example, by introducing a mutation in an Fc region. Such mutations have been described in the art LALA and N297A (Strohl, 2009, Curr. Opin. Biotechnol. 20(6):685-691); and D265A (Baudino et al., 2008, J. Immunol. 181: 6664-69; Strohl, supra). Examples of silent Fc IgG1 antibodies comprise the so-called LALA mutant comprising L234A and L235A mutation in the IgG1 Fc amino acid sequence. Another example of a silent IgG1 antibody comprises the D265A mutation. Another silent IgG1 antibody comprises the so-called DAPA mutant comprising D265A and P329A mutations in the IgG1 Fc amino acid sequence. Another silent IgG1 antibody comprises the N297A mutation, which results in aglycosylated/non-glycosylated antibodies.

[0260] Fc regions can be modified to increase the ability of a CD19 binding molecule containing the Fc region to mediate antibody dependent cellular cytotoxicity (ADCC) and/or antibody dependent cellular phagocytosis (ADCP), for example, by modifying one or more amino acid residues to increase the affinity of the CD19 binding molecule for an activating Fcγ receptor, or to decrease the affinity of the CD19 binding molecule for an inhibitory Fcγ receptor. Human activating Fcγ receptors include FcγRIa, FcγRIIa, FcγRIIIa, and FcγRIIIb, and human inhibitory Fcγ receptor includes FcγRIIb. This approach is described in, e.g., the PCT Publication WO 00/42072 by Presta. Moreover, binding sites on human IgG1 for FcγRI, FcγRII, FcγRIII and FcRn have been mapped and variants with improved binding have been described (see Shields et al., J. Biol. Chem. 276:6591-6604, 2001). Optimization of Fc-mediated effector functions of monoclonal antibodies such as increased ADCC/ADCP function has been described (see Strohl, 2009, Current Opinion in Biotechnology 20:685-691). Mutations that can enhance ADCC/ADCP function include one or more mutations selected from G236A, S239D, F243L, P2471, D280H, K290S, R292P, S298A, S298D, S298V, Y300L, V3051, A330L, 1332E, E333A, K334A, A339D, A339Q, A339T, and P396L (all positions by EU numbering).

[0261] Fc regions can also be modified to increase the ability of a CD19 binding molecule to mediate ADCC and/or ADCP, for example, by modifying one or more amino acids to increase the affinity of the CD19 binding molecule for an activating receptor that would typically not recognize the parent CD19 binding molecule, such as FcαRI. This approach is described in, e.g., Borrok et al., 2015, mAbs. 7(4):743-751.

[0262] Accordingly, in certain aspects, the CD19 binding molecules of the present disclosure can include Fc domains with altered effector function such as, but not limited to, binding to Fc-receptors such as FcRn or leukocyte receptors (for example, as described above or in Section 7.4.1.1), binding to complement (for example as described above or in Section 7.4.1.2), modified disulfide bond architecture (for example as described above or in Section 7.4.1.3), or altered glycosylation patterns (for example as described above or in Section 7.4.1.4). The Fc domains can also be altered to include modifications that improve manufacturability of asymmetric CD19 binding molecules, for example by allowing heterodimerization, which is the preferential pairing of non-identical Fc regions over identical Fc regions. Heterodimerization permits the production of CD19 binding molecules in which different ABMs are connected to one another by an Fc domain containing Fc regions that differ in sequence. Examples of heterodimerization strategies are exemplified in Section 7.4.1.5 (and subsections thereof).

[0263] It will be appreciated that any of the modifications described in Sections 7.4.1.1 through 7.4.1.5 can be combined in any suitable manner to achieve the desired functional properties and/or combined with other modifications to alter the properties of the CD19 binding molecules. In some embodiments, a CD19 binding molecule comprises a IgG1 Fc domain having a mutation at 1, 2, 3, 4, 5, 6, or more than 6 of positions 233, 234, 235, 236, 237, 239, 265, 266, 267, 268, 269, 297, 299, 322, 327, 328, 329, 330, 331 and 332 (EU numbering). For example, a CD19 binding molecule can comprise an IgG1 sequence of SEQ ID NO:1109 with a mutation at 1, 2, 3, 4, 5, 6, or more than 6 of positions 233, 234, 235, 236, 237, 239, 265, 266, 267, 268, 269, 297, 299, 322, 327, 328, 329, 330, 331 and 332.

[0264] In some embodiments, a CD19 binding molecule comprises a first and second human IgG1 Fc region having amino acid substitutions selected from the following combinations of substitutions: substitutions L234A, L235A, and G237A (“LALAGA”); substitutions L234A, L235A, S267K, and P329A (“LALASKPA”); substitutions D265A, P329A, and S267K (“DAPASK”); substitutions G237A, D265A, and P329A (“GADAPA”); substitutions G237A, D265A, P329A, and S267K (“GADAPASK”); substitutions L234A, L235A, and P329G (“LALAPG”), and substitutions L234A, L235A, and P329A (“LALAPA”), wherein the amino acid residues are numbered according to the EU numbering system. It should be understood that the terms “LALAGA”, “LALASKPA”, “DAPASK”, “GADAPA”, “GADAPASK”, “LALAPG”, and “LALAPA” represent shorthand terminology for the different combinations of substitutions described in this paragraph rather than contiguous amino acid sequences.

[0265] In another embodiment, a CD19 binding molecule comprises a human IgG1 Fc region having amino acid substitutions selected from the combinations of substitutions L234A, L235A, S267K, P329A (“LALASKPA”), or substitutions G237A, D265A, P329A, S267K (“GADAPASK”), wherein the amino acid residues are numbered according to the EU numbering system.

[0266] In a further embodiment, a CD19 binding molecules comprises a Fc region selected from FCV1-FCV7. (See Table A below)

[0267] In yet a further embodiment, a CD19 binding molecules comprises a Fc region which is FCV4 or FCV7.

[0268] In some aspects, the CD19 binding molecule has reduced or undetectable binding affinity to a Fc gamma receptor or C1q compared to a polypeptide comprising the wild-type human IgG1 Fc region optionally measured by surface plasmon resonance using a Biacore T200 instrument, wherein the Fc gamma receptor is selected from the group consisting of Fc gamma RIA, Fc gamma RIIIa V158 variant and Fc gamma RIIIa F158 variant, and wherein the binding compared to wildtype is reduced by 50%, 80%, 90%, 95%, 98%, 99% or is undetectable.

[0269] In some aspects, the CD19 binding molecule has reduced or undetectable effector function compared to a polypeptide comprising the wild-type human IgG1 Fc region.

[0270] In some aspects, the CD19 binding molecule is capable of binding to an antigen without triggering detectable antibody-dependent cell-mediated cytotoxicity (ADCC), antibody-dependent cellular phagocytosis (ADCP), or complement dependent cytotoxicity (CDC). In some aspects, the effector function to be reduced or diminished is antibody-dependent cell-mediated cytotoxicity (ADCC) in the individual. In some aspects, the effector function to be reduced or diminished is antibody-dependent cellular phagocytosis (ADCP) in the individual. In some aspects, the effector function to be reduced or diminished is complement dependent cytotoxicity (CDC) in the individual. In some aspects, the first and second Fc regions of a Fc domain each comprise a nucleic acid sequence selected from a nucleic acid sequence listed in Table A below, or any sequence having at least about 90%, 91% 92%, 93%, 94%, 95%, 96%, 97%, 98%, 99%, or 100% identity thereto.

[0271] In an embodiment, a nucleic acid encoding a Fc region comprises the nucleic acid sequence of FCV-7 (see Table A below), or a sequence having at least about 90%, 91% 92%, 93%, 94%, 95%, 96%, 97%, 98%, 99%, or 100% identity thereto. In an embodiment, a nucleic acid encoding a Fc region comprises the nucleic acid sequence of FCV-4 (see Table A below), or a sequence having at least about 90%, 91% 92%, 93%, 94%, 95%, 96%, 97%, 98%, 99%, or 100% identity thereto. In some aspects, a Fc domain comprises first and second Fc regions each of which comprises an amino acid sequence selected from an amino acid sequence listed in Table A below, or any sequence having at least about 90%, 91% 92%, 93%, 94%, 95%, 96%, 97%, 98%, 99%, or 100% identity thereto.

[0272] In an embodiment, a Fc domain comprises first and second Fc regions comprising the amino acid sequence of FCV-7 (see Table A below), or a sequence having at least about 90%, 91% 92%, 93%, 94%, 95%, 96%, 97%, 98%, 99%, or 100% identity thereto. In an embodiment, a Fc domain comprises first and second Fc regions comprising the amino acid sequence of FCV-4 (see Table A below), or a sequence having at least about 90%, 91% 92%, 93%, 94%, 95%, 96%, 97%, 98%, 99%, or 100% identity thereto.

[0273] Additionally provided herein are vectors comprising the polynucleotides encoding CD19 binding molecules comprising a Fc region selected from FCV1-FCV7. (See Table A below)

[0274] Also provided herein are host cells comprising vectors or polynucleotides encoding and capable of expressing CD19 binding molecules comprising a Fc region selected from FCV1-FCV7. (See Table A below).

TABLE A
Sequences of Fc variants

| SEQ ID | | |
|---|---|---|
| No | Description | Sequence |
| 1144 | FCV-1: Human IgG1 | apeaaggpsvflfppkpkdtlmisrtpevtcvvvdvshedpev |
| | Fc variant | kfnwyvdgvevhnaktkpreeqynstyrvvsvltvlhqdwlng |
| | L234A/L235A/P329A | keykckvsnkalaapiektiskakgqprepqvytlppsrdelt |
| | (LALAPA) | knqvsltclvkgfypsdiavewesngqpennykttppvldsdg |
| | Amino acid | sfflyskltvdksrwqqgnvfscsvmhealhnhytqkslslsp |
| | sequence | gk |
| 1145 | FCV-1: Human IgG1 | gcccctgaagccgccggcggaccctccgtgttcctgttccccc |
| | Fc variant | caaagcccaaggacaccctgatgatcagccggacccccgaagt |
| | L234A/L235A/P329A | gacctgcgtggtggtggacgtgtcccacgaggaccctgaagtg |
| | (LALAPA) | aagttcaattggtacgtggacggcgtggaagtgcacaacgcca |
| | Nucleic acid | agaccaagcccagagaggaacagtacaacagcacctaccgggt |
| | sequence | ggtgtccgtgctgaccgtgctgcaccaggactggctgaacggc |
| | | aaagagtacaagtgcaaagtctccaacaaggccctggccgccc |
| | | ccatcgagaaaaccatcagcaaggccaagggccagccccgcga |
| | | gccccaggtgtacacactgccccccagccgggacgagctgacc |
| | | aagaaccaggtgtccctgacctgcctggtcaagggcttctacc |
| | | ccagcgatatcgccgtggaatgggagagcaacggccagcccga |
| | | gaacaactacaagaccaccccccctgtgctggacagcgacggc |
| | | tcattcttcctgtacagcaagctgaccgtggacaagtcccggt |
| | | ggcagcagggcaacgtgttcagctgcagcgtgatgcacgaggc |
| | | cctgcacaaccactacacccagaagtccctgagcctgagcccc |
| | | ggcaaa |
| 1146 | FCV-2: Human IgG1 | apeaagapsvflfppkpkdtlmisrtpevtcvvvdvshedpev |
| | Fc variant | kfnwyvdgvevhnaktkpreeqynstyrvvsvltvlhqdwlng |
| | L234A/L235A/G237A | keykckvsnkalpapiektiskakgqprepqvytlppsrdelt |
| | (LALAGA) | knqvsltclvkgfypsdiavewesngqpennykttppvldsdg |
| | Amino acid | sfflyskltvdksrwqqgnvfscsvmhealhnhytqkslslsp |
| | sequence | gk |
| 1147 | FCV-2: Human IgG1 | gcccctgaagccgccggcgccccctccgtgttcctgttccccc |
| | Fc variant | caaagcccaaggacaccctgatgatcagccggacccccgaagt |
| | L234A/L235A/G237A | gacctgcgtggtggtggacgtgtcccacgaggaccctgaagtg |
| | (LALAGA) | aagttcaattggtacgtggacggcgtggaagtgcacaacgcca |
| | Nucleic acid | agaccaagcccagagaggaacagtacaacagcacctaccgggt |
| | sequence | ggtgtccgtgctgaccgtgctgcaccaggactggctgaacggc |
| | | aaagagtacaagtgcaaagtctccaacaaggccctgcctgccc |
| | | ccatcgagaaaaccatcagcaaggccaagggccagccccgcga |
| | | gccccaggtgtacacactgccccccagccgggacgagctgacc |
| | | aagaaccaggtgtccctgacctgcctggtcaagggcttctacc |
| | | ccagcgatatcgccgtggaatgggagagcaacggccagcccga |
| | | gaacaactacaagaccaccccccctgtgctggacagcgacggc |
| | | tcattcttcctgtacagcaagctgaccgtggacaagtcccggt |
| | | ggcagcagggcaacgtgttcagctgcagcgtgatgcacgaggc |
| | | cctgcacaaccactacacccagaagtccctgagcctgagcccc |
| | | ggcaaa |
| 1148 | FCV-3: Human IgG1 | apeaaggpsvflfppkpkdtlmisrtpevtcvvvdvshedpev |
| | Fc variant | kfnwyvdgvevhnaktkpreeqynstyrvvsvltvlhqdwlng |
| | L234A/L235A/P329G | keykckvsnkalgapiektiskakgqprepqvytlppsrdelt |
| | (LALAPG) | knqvsltclvkgfypsdiavewesngqpennykttppvldsdg |
| | Amino acid | sfflyskltvdksrwqqgnvfscsvmhealhnhytqkslslsp |
| | sequence | gk |
| 1149 | FCV-3: Human IgG1 | gcccctgaagccgccggcggaccctccgtgttcctgttccccc |
| | Fc variant | caaagcccaaggacaccctgatgatcagccggacccccgaagt |
| | L234A/L235A/P329G | gacctgcgtggtggtggacgtgtcccacgaggaccctgaagtg |
| | (LALAPG) | aagttcaattggtacgtggacggcgtggaagtgcacaacgcca |
| | Nucleic acid | agaccaagcccagagaggaacagtacaacagcacctaccgggt |
| | sequence | ggtgtccgtgctgaccgtgctgcaccaggactggctgaacggc |
| | | aaagagtacaagtgcaaagtctccaacaaggccctgggcgccc |
| | | ccatcgagaaaaccatcagcaaggccaagggccagccccgcga |
| | | gccccaggtgtacacactgccccccagccgggacgagctgacc |
| | | aagaaccaggtgtccctgacctgcctggtcaagggcttctacc |
| | | ccagcgatatcgccgtggaatgggagagcaacggccagcccga |
| | | gaacaactacaagaccaccccccctgtgctggacagcgacggc |
| | | tcattcttcctgtacagcaagctgaccgtggacaagtcccggt |
| | | ggcagcagggcaacgtgttcagctgcagcgtgatgcacgaggc |
| | | cctgcacaaccactacacccagaagtccctgagcctgagcccc |
| | | ggcaaa |
| 1150 | FCV-4: Human IgG1 | apeaaggpsvflfppkpkdtlmisrtpevtcvvvdvkhedpev |
| | Fc variant | kfnwyvdgvevhnaktkpreeqynstyrvvsvltvlhqdwlng |
| | L234A/L235A/S267K/ | keykckvsnkalaapiektiskakgqprepqvytlppsrdelt |
| | P329A | knqvsltclvkgfypsdiavewesngqpennykttppvldsdg |
| | (LALASKPA) | sfflyskltvdksrwqqgnvfscsvmhealhnhytqkslslsp |
| | Amino acid | gk |
| | sequence | |
| 1151 | FCV-4: Human IgG1 | gcccctgaagccgccggcggaccctccgtgttcctgttccccc |
| | Fc variant | caaagcccaaggacaccctgatgatcagccggacccccgaagt |
| | L234A/L235A/S267K/ | gacctgcgtggtggtggacgtgaagcacgaggaccctgaagtg |
| | P329A | aagttcaattggtacgtggacggcgtggaagtgcacaacgcca |
| | (LALASKPA) | agaccaagcccagagaggaacagtacaacagcacctaccgggt |
| | Nucleic acid | ggtgtccgtgctgaccgtgctgcaccaggactggctgaacggc |
| | sequence | aaagagtacaagtgcaaagtctccaacaaggccctggccgccc |
| | | ccatcgagaaaaccatcagcaaggccaagggccagccccgcga |
| | | gccccaggtgtacacactgccccccagccgggacgagctgacc |
| | | aagaaccaggtgtccctgacctgcctggtcaagggcttctacc |
| | | ccagcgatatcgccgtggaatgggagagcaacggccagcccga |
| | | gaacaactacaagaccaccccccctgtgctggacagcgacggc |
| | | tcattcttcctgtacagcaagctgaccgtggacaagtcccggt |
| | | ggcagcagggcaacgtgttcagctgcagcgtgatgcacgaggc |
| | | cctgcacaaccactacacccagaagtccctgagcctgagcccc |
| | | ggcaaa |
| 1152 | FCV-5: Human IgG1 | apellggpsvflfppkpkdtlmisrtpevtcvvvavkhedpev |
| | Fc variant | kfnwyvdgvevhnaktkpreeqynstyrvvsvltvlhqdwlng |
| | D265A/P329A/S267K | keykckvsnkalaapiektiskakgqprepqvytlppsrdelt |
| | (DAPASK) | knqvsltclvkgfypsdiavewesngqpennykttppvldsdg |
| | Amino acid | sfflyskltvdksrwqqgnvfscsvmhealhnhytqkslslsp |
| | sequence | gk |
| 1153 | FCV-5: Human IgG1 | gcccctgaactgctgggcggaccctccgtgttcctgttccccc |
| | Fc variant | caaagcccaaggacaccctgatgatcagccggacccccgaagt |
| | D265A/P329A/S267K | gacctgcgtggtggtggccgtgaagcacgaggaccctgaagtg |
| | (DAPASK) | aagttcaattggtacgtggacggcgtggaagtgcacaacgcca |
| | Nucleic acid | agaccaagcccagagaggaacagtacaacagcacctaccgggt |
| | sequence | ggtgtccgtgctgaccgtgctgcaccaggactggctgaacggc |
| | | aaagagtacaagtgcaaagtctccaacaaggccctggccgccc |
| | | ccatcgagaaaaccatcagcaaggccaagggccagccccgcga |
| | | gccccaggtgtacacactgccccccagccgggacgagctgacc |
| | | aagaaccaggtgtccctgacctgcctggtcaagggcttctacc |
| | | ccagcgatatcgccgtggaatgggagagcaacggccagcccga |
| | | gaacaactacaagaccaccccccctgtgctggacagcgacggc |
| | | tcattcttcctgtacagcaagctgaccgtggacaagtcccggt |
| | | ggcagcagggcaacgtgttcagctgcagcgtgatgcacgaggc |
| | | cctgcacaaccactacacccagaagtccctgagcctgagcccc |
| | | ggcaaa |
| 1154 | FCV-6: Human IgG1 | apellgapsvflfppkpkdtlmisrtpevtcvvvavshedpev |
| | Fc variant | kfnwyvdgvevhnaktkpreeqynstyrvvsvltvlhqdwlng |
| | G237A/D265A/P329A | keykckvsnkalaapiektiskakgqprepqvytlppsrdelt |
| | (GADAPA) | knqvsltclvkgfypsdiavewesngqpennykttppvldsdg |
| | Amino acid | sfflyskltvdksrwqqgnvfscsvmhealhnhytqkslslsp |
| | sequence | gk |
| 1155 | FCV-6: Human IgG1 | gcccctgaactgctgggcgccccctccgtgttcctgttccccc |
| | Fc variant | caaagcccaaggacaccctgatgatcagccggacccccgaagt |
| | G237A/D265A/P329A | gacctgcgtggtggtggccgtgtcccacgaggaccctgaagtg |
| | (GADAPA) | aagttcaattggtacgtggacggcgtggaagtgcacaacgcca |
| | Nucleic acid | agaccaagcccagagaggaacagtacaacagcacctaccgggt |
| | sequence | ggtgtccgtgctgaccgtgctgcaccaggactggctgaacggc |
| | | aaagagtacaagtgcaaagtctccaacaaggccctggccgccc |
| | | ccatcgagaaaaccatcagcaaggccaagggccagccccgcga |
| | | gccccaggtgtacacactgccccccagccgggacgagctgacc |
| | | aagaaccaggtgtccctgacctgcctggtcaagggcttctacc |
| | | ccagcgatatcgccgtggaatgggagagcaacggccagcccga |
| | | gaacaactacaagaccaccccccctgtgctggacagcgacggc |
| | | tcattcttcctgtacagcaagctgaccgtggacaagtcccggt |
| | | ggcagcagggcaacgtgttcagctgcagcgtgatgcacgaggc |
| | | cctgcacaaccactacacccagaagtccctgagcctgagcccc |
| | | ggcaaa |
| 1156 | FCV-7: Human IgG1 | apellgapsvflfppkpkdtlmisrtpevtcvvvavkhedpev |
| | Fc variant | kfnwyvdgvevhnaktkpreeqynstyrvvsvltvlhqdwlng |
| | G237A/D265A/P329A/ | keykckvsnkalaapiektiskakgqprepqvytlppsrdelt |
| | S267K | knqvsltclvkgfypsdiavewesngqpennykttppvldsdg |
| | (GADAPASK) | sfflyskltvdksrwqqgnvfscsvmhealhnhytqkslslsp |
| | Amino acid | gk |
| | sequence | |
| 1157 | FCV-7: Human IgG1 | gcccctgaactgctgggcgccccctccgtgttcctgttccccc |
| | Fc variant | caaagcccaaggacaccctgatgatcagccggacccccgaagt |
| | G237A/D265A/P329A/ | gacctgcgtggtggtggccgtgaagcacgaggaccctgaagtg |
| | S267K | aagttcaattggtacgtggacggcgtggaagtgcacaacgcca |
| | (GADAPASK) | agaccaagcccagagaggaacagtacaacagcacctaccgggt |
| | Nucleic acid | ggtgtccgtgctgaccgtgctgcaccaggactggctgaacggc |
| | sequence | aaagagtacaagtgcaaagtctccaacaaggccctggccgccc |
| | | ccatcgagaaaaccatcagcaaggccaagggccagccccgcga |
| | | gccccaggtgtacacactgccccccagccgggacgagctgacc |
| | | aagaaccaggtgtccctgacctgcctggtcaagggcttctacc |
| | | ccagcgatatcgccgtggaatgggagagcaacggccagcccga |
| | | gaacaactacaagaccaccccccctgtgctggacagcgacggc |
| | | tcattcttcctgtacagcaagctgaccgtggacaagtcccggt |
| | | ggcagcagggcaacgtgttcagctgcagcgtgatgcacgaggc |
| | | cctgcacaaccactacacccagaagtccctgagcctgagcccc |
| | | ggcaaa |

TABLE B
Sequences of Antibodies and Fc variants

| SEQ ID | | |
|---|---|---|
| No | Description | Sequence |
| 1158 | FCV-8: Human IgG1 | apellggpsvflfppkpkdtlmisrtpevtcvvvavshedpev |
| | Fc variant | kfnwyvdgvevhnaktkpreeqynstyrvvsvltvlhqdwlng |
| | D265A/P329A | keykckvsnkalaapiektiskakgqprepqvytlppsrdelt |
| | (DAPA) | knqvsltclvkgfypsdiavewesngqpennykttppvldsdg |
| | Amino acid | sfflyskltvdksrwqqgnvfscsvmhealhnhytqkslslsp |
| | sequence | gk |
| 1159 | FCV-8: Human IgG1 | gcccctgaactgctgggcggaccctccgtgttcctgttccccc |
| | Fc variant | caaagcccaaggacaccctgatgatcagccggacccccgaagt |
| | D265A/P329A | gacctgcgtggtggtggccgtgtcccacgaggaccctgaagtg |
| | (DAPA) | aagttcaattggtacgtggacggcgtggaagtgcacaacgcca |
| | Nucleic acid | agaccaagcccagagaggaacagtacaacagcacctaccgggt |
| | sequence | ggtgtccgtgctgaccgtgctgcaccaggactggctgaacggc |
| | | aaagagtacaagtgcaaagtctccaacaaggccctggccgccc |
| | | ccatcgagaaaaccatcagcaaggccaagggccagccccgcga |
| | | gccccaggtgtacacactgccccccagccgggacgagctgacc |
| | | aagaaccaggtgtccctgacctgcctggtcaagggcttctacc |
| | | ccagcgatatcgccgtggaatgggagagcaacggccagcccga |
| | | gaacaactacaagaccaccccccctgtgctggacagcgacggc |
| | | tcattcttcctgtacagcaagctgaccgtggacaagtcccggt |
| | | ggcagcagggcaacgtgttcagctgcagcgtgatgcacgaggc |
| | | cctgcacaaccactacacccagaagtccctgagcctgagcccc |
| | | ggcaaa |
| 1160 | FCV-9: Human IgG1 | apellggpsvflfppkpkdtlmisrtpevtcvvvavshedpev |
| | Fc variant | kfnwyvdgvevhnaktkpreeqyastyrvvsvltvlhqdwlng |
| | D265A/N297A/P329A | keykckvsnkalaapiektiskakgqprepqvytlppsrdelt |
| | (DANAPA) | knqvsltclvkgfypsdiavewesngqpennykttppvldsdg |
| | Amino acid | sfflyskltvdksrwqqgnvfscsvmhealhnhytqkslslsp |
| | sequence | gk |
| 1161 | FCV-9: Human IgG1 | gcccctgaactgctgggaggccctagcgtgttcctgttccccc |
| | Fc variant | caaagcccaaggacaccctgatgatcagccggacccccgaagt |
| | D265A/N297A/P329A | gacctgtgtggtggtggccgtgtctcacgaggaccctgaagtg |
| | (DANAPA) | aagtttaattggtacgtggacggcgtggaagtgcacaacgcca |
| | Nucleic acid | agaccaagcccagagaggaacagtacgccagcacctaccgggt |
| | sequence | ggtgtccgtgctgacagtgctgcaccaggactggctgaacggc |
| | | aaagagtacaagtgcaaggtgtccaacaaggccctggccgctc |
| | | ccatcgagaaaaccatcagcaaggccaagggccagccccgcga |
| | | accccaggtgtacacactgccccctagcagggacgagctgacc |
| | | aagaaccaggtgtccctgacctgcctcgtgaagggcttctacc |
| | | cctccgatatcgccgtggaatgggagagcaacggccagcccga |
| | | gaacaactacaagaccaccccccctgtgctggactccgacggc |
| | | tcattcttcctgtacagcaagctgaccgtggacaagtcccggt |
| | | ggcagcagggcaacgtgttcagctgctccgtgatgcacgaggc |
| | | cctgcacaaccactacacccagaagtccctgagcctgagcccc |
| | | ggcaaa |
| 1162 | Anti-CD3 human | evqlvesggglvqpggslklscaasgftfntyamnwvrqasgk |
| | IgG1 Heavy Chain | glewvgrirskynnyatyyadsvkdrftisrddskstlylqmn |
| | Amino acid | slktedtavyycvrhgnfgnsyvswfaywgqgtlvtvssastk |
| | sequence | gpsvfplapsskstsggtaalgclvkdyfpepvtvswnsgalt |
| | | sgvhtfpavlqssglyslssvvtvpssslgtqtyicnvnhkps |
| | | ntkvdkrvepkscdkthtcppcpapellggpsvflfppkpkdt |
| | | lmisrtpevtcvvvdvshedpevkfnwyvdgvevhnaktkpre |
| | | eqynstyrvvsvltvlhqdwlngkeykckvsnkalpapiekti |
| | | skakgqprepqvytlppsrdeltknqvsltclvkgfypsdiav |
| | | ewesngqpennykttppvldsdgsfflyskltvdksrwqqgnv |
| | | fscsvmhealhnhytqkslslspgk |
| 1163 | Anti-CD3 human | gaagtgcagctggtggaatctggcggcggactggtgcagcctg |
| | IgG1 Heavy Chain | gcggatctctgaagctgagctgtgccgccagcggcttcacctt |
| | Nucleic acid | caacacctacgccatgaactgggtgcgccaggcctctggcaag |
| | sequence | ggcctggaatgggtgggacggatcagaagcaagtacaacaatt |
| | | acgccacctactacgccgacagcgtgaaggaccggttcaccat |
| | | cagccgggacgacagcaagagcaccctgtacctgcagatgaac |
| | | agcctgaaaaccgaggacaccgccgtgtactactgcgtgcggc |
| | | acggcaacttcggcaacagctatgtgtcttggtttgcctactg |
| | | gggccagggcaccctcgtgacagtgagctcagctagcaccaag |
| | | ggccccagcgtgttccccctggcgcccagcagcaagagcacca |
| | | gcggcggcacagccgccctgggctgcctggtgaaggactactt |
| | | ccccgagccagtgaccgtgtcctggaacagcggagccctgacc |
| | | tccggcgtgcacaccttccccgccgtgctgcagagcagcggcc |
| | | tgtacagcctgagcagcgtggtgaccgtgcccagcagcagcct |
| | | gggcacccagacctacatctgcaacgtgaaccacaagcccagc |
| | | aacaccaaggtggacaagagagtggagcccaagagctgcgaca |
| | | agacccacacctgccccccctgtcctgcccctgaactgctggg |
| | | cggaccctccgtgttcctgttccccccaaagcccaaggacacc |
| | | ctgatgatcagccggacccccgaagtgacctgcgtggtggtgg |
| | | acgtgtcccacgaggaccctgaagtgaagttcaattggtacgt |
| | | ggacggcgtggaagtgcacaacgccaagaccaagcccagagag |
| | | gaacagtacaacagcacctaccgggtggtgtccgtgctgaccg |
| | | tgctgcaccaggactggctgaacggcaaagagtacaagtgcaa |
| | | agtctccaacaaggccctgcctgcccccatcgagaaaaccatc |
| | | agcaaggccaagggccagccccgcgagccccaggtgtacacac |
| | | tgccccccagccgggacgagctgaccaagaaccaggtgtccct |
| | | gacctgcctggtcaagggcttctaccccagcgatatcgccgtg |
| | | gaatgggagagcaacggccagcccgagaacaactacaagacca |
| | | ccccccctgtgctggacagcgacggctcattcttcctgtacag |
| | | caagctgaccgtggacaagtcccggtggcagcagggcaacgtg |
| | | ttcagctgcagcgtgatgcacgaggccctgcacaaccactaca |
| | | cccagaagtccctgagcctgagccccggcaaa |
| 1164 | Anti-CD3 human | evqlvesggglvqpggslklscaasgftfntyamnwvrqasgk |
| | IgG1 | glewvgrirskynnyatyyadsvkdrftisrddskstlylqmn |
| | R214K allotype | slktedtavyycvrhgnfgnsyvswfaywgqgtlvtvssastk |
| | Heavy Chain | gpsvfplapsskstsggtaalgclvkdyfpepvtvswnsgalt |
| | Amino acid | sgvhtfpavlqssglyslssvvtvpssslgtqtyicnvnhkps |
| | sequence | ntkvdkkvepkscdkthtcppcpapellggpsvflfppkpkdt |
| | | lmisrtpevtcvvvdvshedpevkfnwyvdgvevhnaktkpre |
| | | eqynstyrvvsvltvlhqdwlngkeykckvsnkalpapiekti |
| | | skakgqprepqvytlppsrdeltknqvsltclvkgfypsdiav |
| | | ewesngqpennykttppvldsdgsfflyskltvdksrwqqgnv |
| | | fscsvmhealhnhytqkslslspgk |
| 1165 | Anti-CD3 human | gaagtgcagctggtggaatctggcggcggactggtgcagcctg |
| | igG1 | gcggatctctgaagctgagctgtgccgccagcggcttcacctt |
| | R214K allotype | caacacctacgccatgaactgggtgcgccaggcctctggcaag |
| | Heavy Chain | ggcctggaatgggtgggacggatcagaagcaagtacaacaatt |
| | Nucleic acid | acgccacctactacgccgacagcgtgaaggaccggttcaccat |
| | sequence | cagccgggacgacagcaagagcaccctgtacctgcagatgaac |
| | | agcctgaaaaccgaggacaccgccgtgtactactgcgtgcggc |
| | | acggcaacttcggcaacagctatgtgtcttggtttgcctactg |
| | | gggccagggcaccctcgtgacagtgagctcagctagcaccaag |
| | | ggccccagcgtgttccccctggcgcccagcagcaagagcacca |
| | | gcggcggcacagccgccctgggctgcctggtgaaggactactt |
| | | ccccgagccagtgaccgtgtcctggaacagcggagccctgacc |
| | | tccggcgtgcacaccttccccgccgtgctgcagagcagcggcc |
| | | tgtacagcctgagcagcgtggtgaccgtgcccagcagcagcct |
| | | gggcacccagacctacatctgcaacgtgaaccacaagcccagc |
| | | aacaccaaggggacaagaaggtggagcccaagagctgcgaca |
| | | agacccacacctgccccccctgtcctgcccctgaactgctggg |
| | | cggaccctccgtgttcctgttccccccaaagcccaaggacacc |
| | | ctgatgatcagccggacccccgaagtgacctgcgtggtggtgg |
| | | acgtgtcccacgaggaccctgaagtgaagttcaattggtacgt |
| | | ggacggcgtggaagtgcacaacgccaagaccaagcccagagag |
| | | gaacagtacaacagcacctaccgggtggtgtccgtgctgaccg |
| | | tgctgcaccaggactggctgaacggcaaagagtacaagtgcaa |
| | | agtctccaacaaggccctgcctgcccccatcgagaaaaccatc |
| | | agcaaggccaagggccagccccgcgagccccaggtgtacacac |
| | | tgccccccagccgggacgagctgaccaagaaccaggtgtccct |
| | | gacctgcctggtcaagggcttctaccccagcgatatcgccgtg |
| | | gaatgggagagcaacggccagcccgagaacaactacaagacca |
| | | ccccccctgtgctggacagcgacggctcattcttcctgtacag |
| | | caagctgaccgtggacaagtcccggtggcagcagggcaacgtg |
| | | ttcagctgcagcgtgatgcacgaggccctgcacaaccactaca |
| | | cccagaagtccctgagcctgagccccggcaaa |
| 1166 | Anti-CD3 human | qavvtqepsltvspggtvtltcrsstgavttsnyanwvqqkpg |
| | Light Chain | qaprgliggtnkrapwtparfsgsllgdkaaltlsgaqpedea |
| | Amino acid | eyfcalwysnlwvfgggtkltvlgqpkaapsvtlfppsseelq |
| | sequence | ankatlvclisdfypgavtvawkadsspvkagvetttpskqsn |
| | | nkyaassylsltpeqwkshrsyscqvthegstvektvaptecs |
| 1167 | Anti-CD3 human | caggctgtcgtgacccaggaacctagcctgaccgtgtctcctg |
| | Light Chain | gcggaaccgtgaccctgacctgtagatctagcacaggcgccgt |
| | Nucleic acid | gaccaccagcaactacgccaattgggtgcagcagaagcccggc |
| | sequence | caggctcctagaggactgatcggcggcaccaacaagagagccc |
| | | cttggacccctgccagattcagcggctctctgctgggagataa |
| | | ggccgccctgacactgtctggcgcccagcctgaggatgaggcc |
| | | gagtacttttgcgccctgtggtacagcaacctgtgggtgttcg |
| | | gcggaggcaccaagctgaccgtgctgggccagcctaaggccgc |
| | | tccctccgtgaccctgttcccccccagctccgaggaactgcag |
| | | gccaacaaggccaccctggtgtgcctgatcagcgacttctacc |
| | | ctggcgccgtgaccgtggcctggaaggccgacagcagccccgt |
| | | gaaggccggcgtggagacaaccacccccagcaagcagagcaac |
| | | aacaagtacgccgccagcagctacctgagcctgacccccgagc |
| | | agtggaagagccacagaagctacagctgccaggtcacccacga |
| | | gggcagcaccgtggagaaaaccgtggcccccaccgagtgcagc |

[0275] 7.4.1.1. Fc Domains with Altered FcR Binding

[0276] The Fc domains of the CD19 binding molecules can show altered binding to one or more Fc-receptors (FcRs) in comparison with the corresponding native immunoglobulin. The binding to any particular Fc-receptor can be increased or decreased. In one embodiment, the Fc domain comprises one or more modifications which alter its Fc-receptor binding profile.

[0277] Human cells can express a number of membrane bound FcRs selected from FcaR, FcεR, FcγR, FcRn and glycan receptors. Some cells are also capable of expressing soluble (ectodomain) FcR (Fridman et al., 1993, J Leukocyte Biology 54: 504-512). FcγR can be further divided by affinity of IgG binding (high/ow) and biological effect (activating/inhibiting). Human FcγRI is widely considered to be the sole ‘high affinity’ receptor whilst all of the others are considered as medium to low. FcγRIIb is the sole receptor with ‘inhibitory’ functionality by virtue of its intracellular ITIM motif whilst all of the others are considered as ‘activating’ by virtue of ITAM motifs or pairing with the common FcγR-γchain. FcγRIIIb is also unique in that although activatory it associates with the cell via a GPI anchor. In total, humans express six “standard” ^{m}FcγRs: FcγRI, FcγRIIa, FcγRIIb, FcγRIIc, FcγRIIIa, and FcγRIIIb. In addition to these sequences there are a large number of sequence or allotypic variants spread across these families. Some of these have been found to have important functional consequence and so are sometimes considered to be receptor sub-types of their own. Examples include FcγRIIa^{H134R}, FcγRIIb^{I190T}, FcγRIIIa^{F158V}, FcγRIIIb^{NA1}, FcγRIIIb^{NA2}, and FcγRIII^{SH}. Each receptor sequence has been shown to have different affinities for the 4 sub-classes of IgG: IgG1, IgG2, IgG3 and IgG4 (Bruhns, 1993, Blood 113:3716-3725). Other species have somewhat different numbers and functionality of FcγR, with the mouse system being the best studied to date and comprising of 4 FcγR, FcγRI FcγRIIb FcγRIII FcγRIV (Bruhns, 2012, Blood 119:5640-5649). Human FcγRI on cells is normally considered to be “occupied” by monomeric IgG in normal serum conditions due to its affinity for IgG1/IgG3/IgG4 (about 10⁻⁸ M) and the concentration of these IgG in serum (about 10 mg/ml). Hence cells bearing FcγRI on their surface are considered to be capable for “screening” or “sampling” of their antigenic environment vicariously through the bound polyspecific IgG. The other receptors having lower affinities for IgG sub-classes (in the range of about 10⁻⁵-10⁻⁷ M) are normally considered to be “unoccupied.” The low affinity receptors are hence inherently sensitive to the detection of and activation by antibody involved immune complexes. The increased Fc density in an antibody immune complex results in increased functional affinity of binding avidity to low affinity FcγR. This has been demonstrated in vitro using a number of methods (Shields et al., 2001, J Biol Chem 276(9):6591-6604; Lux et al., 2013, J Immunol 190:4315-4323). It has also been implicated as being one of the primary modes of action in the use of anti-RhD to treat ITP in humans (Crow, 2008, Transfusion Medicine Reviews 22:103-116).

[0278] Many cell types express multiple types of FcγR and so binding of IgG or antibody immune complex to cells bearing FcγR can have multiple and complex outcomes depending upon the biological context. Most simply, cells can either receive an activatory, inhibitory or mixed signal. This can result in events such as phagocytosis (e.g., macrophages and neutrophils), antigen processing (e.g., dendritic cells), reduced IgG production (e.g., B-cells) or degranulation (e.g., neutrophils, mast cells). There are data to support that the inhibitory signal from FcγRIIb can dominate that of activatory signals (Proulx, 2010, Clinical Immunology 135:422-429).

[0279] There are a number of useful Fc substitutions that can be made to alter binding to one or more of the FcγR receptors. Substitutions that result in increased binding as well as decreased binding can be useful. For example, it is known that increased binding to FcγRIIIa generally results in increased ADCC (antibody dependent cell-mediated cytotoxicity; the cell-mediated reaction where nonspecific cytotoxic cells that express FcγRs recognize bound antibody on a target cell and subsequently cause lysis of the target cell). Similarly, decreased binding to FcγRIIb (an inhibitory receptor) can be beneficial as well in some circumstances. Amino acid substitutions that find use in the present disclosure include those listed in US 2006/0024298 (particularly FIG. 41), US 2006/0121032, US 2006/0235208, US 2007/0148170, and US 2019/0100587. Particular variants that find use include, but are not limited to, 236A, 239D, 239E, 332E, 332D, 239D/332E, 267D, 267E, 328F, 267E/328F, 236A/332E, 239D/332E/330Y, 239D, 332E/330L, 243A, 243L, 264A, 264V, 299T, 265A/297A/329A, 265N/297D/329G, and 265E/297Q/329S.

[0280] FcRn has a crucial role in maintaining the long half-life of IgG in the serum of adults and children. The receptor binds IgG in acidified vesicles (pH <6.5) protecting the IgG molecule from degradation, and then releasing it at the higher pH of 7.4 in blood.

[0281] FcRn is unlike leukocyte Fc receptors, and instead, has structural similarity to MHC class I molecules. It is a heterodimer composed of a β₂-microglobulin chain, non-covalently attached to a membrane-bound chain that includes three extracellular domains. One of these domains, including a carbohydrate chain, together with β₂-microglobulin interacts with a site between the CH2 and CH3 domains of Fc. The interaction includes salt bridges made to histidine residues on IgG that are positively charged at pH <6.5. At higher pH, the His residues lose their positive charges, the FcRn-IgG interaction is weakened and IgG dissociates.

[0282] In one embodiment, a CD19 binding molecule comprises an Fc domain that binds to human FcRn.

[0283] In one embodiment, the Fc domain has an Fc region(s) (e.g., one or two) comprising a histidine residue at position 310, and in some cases also at position 435. These histidine residues are important for human FcRn binding. In one embodiment, the histidine residues at positions 310 and 435 are native residues, i.e., positions 310 and 435 are not modified. Alternatively, one or both of these histidine residues can be present as a result of a modification.

[0284] The CD19 binding molecules can comprise one or more Fc regions that alter Fc binding to FcRn. The altered binding can be increased binding or decreased binding.

[0285] In one embodiment, the CD19 binding molecule comprises an Fc domain in which at least one (and optionally both) Fc regions comprises one or more modifications such that it binds to FcRn with greater affinity and avidity than the corresponding native immunoglobulin.

[0286] Fc substitutions that increase binding to the FcRn receptor and increase serum half life are described in US 2009/0163699, including, but not limited to, 434S, 434A, 428L, 308F, 2591, 428L/434S, 2591/308F, 4361/428L, 4361 or V/434S, 436V/428L and 2591/308F/428L.

[0287] In one embodiment, the Fc region is modified by substituting the threonine residue at position 250 with a glutamine residue (T250Q).

[0288] In one embodiment, the Fc region is modified by substituting the methionine residue at position 252 with a tyrosine residue (M252Y)

[0289] In one embodiment, the Fc region is modified by substituting the serine residue at position 254 with a threonine residue (S254T).

[0290] In one embodiment, the Fc region is modified by substituting the threonine residue at position 256 with a glutamic acid residue (T256E).

[0291] In one embodiment, the Fc region is modified by substituting the threonine residue at position 307 with an alanine residue (T307A).

[0292] In one embodiment, the Fc region is modified by substituting the threonine residue at position 307 with a proline residue (T307P).

[0293] In one embodiment, the Fc region is modified by substituting the valine residue at position 308 with a cysteine residue (V308C).

[0294] In one embodiment, the Fc region is modified by substituting the valine residue at position 308 with a phenylalanine residue (V308F).

[0295] In one embodiment, the Fc region is modified by substituting the valine residue at position 308 with a proline residue (V308P).

[0296] In one embodiment, the Fc region is modified by substituting the glutamine residue at position 311 with an alanine residue (Q311A).

[0297] In one embodiment, the Fc region is modified by substituting the glutamine residue at position 311 with an arginine residue (Q311R).

[0298] In one embodiment, the Fc region is modified by substituting the methionine residue at position 428 with a leucine residue (M428L).

[0299] In one embodiment, the Fc region is modified by substituting the histidine residue at position 433 with a lysine residue (H433K).

[0300] In one embodiment, the Fc region is modified by substituting the asparagine residue at position 434 with a phenylalanine residue (N434F).

[0301] In one embodiment, the Fc region is modified by substituting the asparagine residue at position 434 with a tyrosine residue (N434Y).

[0302] In one embodiment, the Fc region is modified by substituting the methionine residue at position 252 with a tyrosine residue, the serine residue at position 254 with a threonine residue, and the threonine residue at position 256 with a glutamic acid residue (M252Y/S254T/T256E).

[0303] In one embodiment, the Fc region is modified by substituting the valine residue at position 308 with a proline residue and the asparagine residue at position 434 with a tyrosine residue (V308P/N434Y).

[0304] In one embodiment, the Fc region is modified by substituting the methionine residue at position 252 with a tyrosine residue, the serine residue at position 254 with a threonine residue, the threonine residue at position 256 with a glutamic acid residue, the histidine residue at position 433 with a lysine residue and the asparagine residue at position 434 with a phenylalanine residue (M252Y/S254T/T256E/H433K/N434F).

[0305] It will be appreciated that any of the modifications listed above can be combined to alter FcRn binding.

[0306] In one embodiment, the CD19 binding molecule comprises an Fc domain in which one or both Fc regions comprise one or more modifications such that the Fc domain binds to FcRn with lower affinity and avidity than the corresponding native immunoglobulin.

[0307] In one embodiment, the Fc region comprises any amino acid residue other than histidine at position 310 and/or position 435.

[0308] The CD19 binding molecule can comprise an Fc domain in which one or both Fc regions comprise one or more modifications which increase its binding to FcγRIIb. FcγRIIb is the only inhibitory receptor in humans and the only Fc receptor found on B cells.

[0309] In one embodiment, the Fc region is modified by substituting the proline residue at position 238 with an aspartic acid residue (P238D).

[0310] In one embodiment, the Fc region is modified by substituting the glutamic acid residue at position 258 with an alanine residue (E258A).

[0311] In one embodiment, the Fc region is modified by substituting the serine residue at position 267 with an alanine residue (S267A).

[0312] In one embodiment, the Fc region is modified by substituting the serine residue at position 267 with a glutamic acid residue (S267E).

[0313] In one embodiment, the Fc region is modified by substituting the leucine residue at position 328 with a phenylalanine residue (L328F).

[0314] In one embodiment, the Fc region is modified by substituting the glutamic acid residue at position 258 with an alanine residue and the serine residue at position 267 with an alanine residue (E258A/S267A).

[0315] In one embodiment, the Fc region is modified by substituting the serine residue at position 267 with a glutamic acid residue and the leucine residue at position 328 with a phenylalanine residue (S267E/L328F).

[0316] It will be appreciated that any of the modifications listed above can be combined to increase FcγRIIb binding.

[0317] In one embodiment, CD19 binding molecules are provided comprising Fc domains which display decreased binding to FcγR.

[0318] In one embodiment, the CD19 binding molecule comprises an Fc domain in which one or both Fc regions comprise one or more modifications that decrease Fc binding to FcγR.

[0319] The Fc domain can be derived from IgG1.

[0320] In one embodiment, the Fc region is modified by substituting the leucine residue at position 234 with an alanine residue (L234A).

[0321] In one embodiment, the Fc region is modified by substituting the leucine residue at position 235 with an alanine residue (L235A).

[0322] In one embodiment, the Fc region is modified by substituting the glycine residue at position 236 with an arginine residue (G236R).

[0323] In one embodiment, the Fc region is modified by substituting the asparagine residue at position 297 with an alanine residue (N297A) or a glutamine residue (N297Q).

[0324] In one embodiment, the Fc region is modified by substituting the serine residue at position 298 with an alanine residue (S298A).

[0325] In one embodiment, the Fc region is modified by substituting the leucine residue at position 328 with an arginine residue (L328R).

[0326] In one embodiment, the Fc region is modified by substituting the leucine residue at position 234 with an alanine residue and the leucine residue at position 235 with an alanine residue (L234A/L235A).

[0327] In one embodiment, the Fc region is modified by substituting the phenylalanine residue at position 234 with an alanine residue and the leucine residue at position 235 with an alanine residue (F234A/L235A).

[0328] In one embodiment, the Fc region is modified by substituting the glycine residue at position 236 with an arginine residue and the leucine residue at position 328 with an arginine residue (G236R/L328R).

[0329] In one embodiment, the Fc region is modified by substituting the aspartate residue at position 265 with an alanine residue, the asparagine residue at position 297 with an alanine residue and the proline residue at position 329 with an alanine residue (D265A/N297A/P329A).

[0330] In one embodiment, the Fc region is modified by substituting the aspartate residue at position 265 with an asparagine residue, the asparagine residue at position 297 with an aspartate residue and the proline residue at position 329 with a glycine residue (D265N/N297D/P329G).

[0331] In one embodiment, the Fc region is modified by substituting the aspartate residue at position 265 with a glutamate residue, the asparagine residue at position 297 with an glutamine residue and the proline residue at position 329 with a serine residue (D265E/N297Q/P329S).

[0332] It will be appreciated that any of the modifications listed above can be combined to decrease FcγR binding.

[0333] In one embodiment, a CD19 binding molecule comprises an Fc domain in which one or both Fc regions comprise one or more modifications that decrease Fc binding to FcγRIIIa without affecting the Fc's binding to FcγRII.

[0334] In one embodiment, the Fc region is modified by substituting the serine residue at position 239 with an alanine residue (S239A).

[0335] In one embodiment, the Fc region is modified by substituting the glutamic acid residue at position 269 with an alanine residue (E269A).

[0336] In one embodiment, the Fc region is modified by substituting the glutamic acid residue at position 293 with an alanine residue (E293A).

[0337] In one embodiment, the Fc region is modified by substituting the tyrosine residue at position 296 with a phenylalanine residue (Y296F).

[0338] In one embodiment, the Fc region is modified by substituting the valine residue at position 303 with an alanine residue (V303A).

[0339] In one embodiment, the Fc region is modified by substituting the alanine residue at position 327 with a glycine residue (A327G).

[0340] In one embodiment, the Fc region is modified by substituting the lysine residue at position 338 with an alanine residue (K338A).

[0341] In one embodiment, the Fc region is modified by substituting the aspartic acid residue at position 376 with an alanine residue (D376A).

[0342] It will be appreciated that any of the modifications listed above can be combined to decrease FcγRIIIa binding.

[0343] Fc region variants with decreased FcR binding can be referred to as “FcγR ablation variants,” “FcγR silencing variants” or “Fc knock out (FcKO or KO)” variants. For some therapeutic applications, it is desirable to reduce or remove the normal binding of an Fc domain to one or more or all of the Fcγ receptors (e.g., FcγR1, FcγRIIa, FcγRIIb, FcγRIIIa) to avoid additional mechanisms of action. That is, for example, in many embodiments, particularly in the use of MBMs that bind CD3 monovalently, it is generally desirable to ablate FcγRIIIa binding to eliminate or significantly reduce ADCC activity. In some embodiments, at least one of the Fc regions of the MBMs described herein comprises one or more Fcγ receptor ablation variants. In some embodiments, both of the Fc regions comprise one or more Fcγ receptor ablation variants. These ablation variants are depicted in Table 3, and each can be independently and optionally included or excluded, with some aspects utilizing ablation variants selected from the group consisting of G236R/L328R, E233P/L234V/L235A/G236de/S239K, E23P/L234V/L235A/G236del/S267K, E233P/L234V/L235A/G236del/S239K/A327G, E3P/234V/L235A9G236del/S267K/A327G, E233P/L234V/L235A/G236del, D265A/N297A/P329A, D265N/N297D/P329G, and D265E/N297Q/P329S (“del” connotes a deletion, e.g., G236del refers to a deletion of the glycine at position 238). It should be noted that the ablation variants referenced herein ablate FcγR binding but generally not FcRn binding.

TABLE 3
Ablation Variants

| Variant | Variant(s), cont. |
|---|---|
| G236R | P329K |
| S239G | A330L |
| S239K | A330S/P331S |
| S239Q | I332K |
| S239R | I332R |
| V266D | V266D/A327Q |
| S267K | V266D/P329K |
| S267R | S267R/A327Q |
| H268K | S267R/P329K |
| E269R | G236R/L328R |
| 299R | E233P/L234V/L235A/G236del/S239K |
| 299K | E233P/L234V/L235A/G236del/S267K |
| K322A | E233P/L234V/L235A/G236del/S239K/A327G |
| A327G | E233P/L234V/L235A/G236del/S267K/A327G |
| A327L | E233P/L234V/L235A/G236del |
| A327N | S239K/S267K |
| A327Q | 267K/P329K |
| L328E | D265A/N297A/P329A |
| L328R | D265N/N297D/P329G |
| P329A | D265E/N297Q/P329S |
| P329H | |

[0344] In some embodiments, the MBMs of the present disclosure comprises a first Fc region and a second Fc region. In some embodiments, the first Fc region and/or the second Fc region can comprise the following mutations: E233P, L234V, L235A, G236del, and S267K.

[0345] The Fc domain of human IgG1 has the highest binding to the Fcγ receptors, and thus ablation variants can be used when the constant domain (or Fc domain) in the backbone of the heterodimeric antibody is IgG1.

[0346] Alternatively, or in addition to ablation variants in an IgG1 background, mutations at the glycosylation position 297, e.g., substituting the asparagine residue at position 297 with an alanine residue (N297A) or a glutamine residue (N297Q), can significantly ablate binding to FcγRIIIa, for example. Human IgG2 and IgG4 have naturally reduced binding to the Fcγ receptors, and thus those backbones can be used with or without the ablation variants.

[0347] 7.4.1.2. Fc Domains with Altered Complement Binding

[0348] The CD19 binding molecules can comprise an Fc domain in which one or both Fc regions comprises one or more modifications that alter Fc binding to complement. Altered complement binding can be increased binding or decreased binding.

[0349] In one embodiment, the Fc region comprises one or more modifications which decrease its binding to C1q. Initiation of the classical complement pathway starts with binding of hexameric C1q protein to the CH2 domain of antigen bound IgG and IgM.

[0350] In one embodiment, the CD19 binding molecule comprises an Fc domain in which one or both Fc regions comprises one or more modifications to decrease Fc binding to C1q.

[0351] In one embodiment, the Fc region is modified by substituting the leucine residue at position 234 with an alanine residue (L234A).

[0352] In one embodiment, the Fc region is modified by substituting the leucine residue at position 235 with an alanine residue (L235A).

[0353] In one embodiment, the Fc region is modified by substituting the leucine residue at position 235 with a glutamic acid residue (L235E).

[0354] In one embodiment, the Fc region is modified by substituting the glycine residue at position 237 with an alanine residue (G237A).

[0355] In one embodiment, the Fc region is modified by substituting the lysine residue at position 322 with an alanine residue (K322A).

[0356] In one embodiment, the Fc region is modified by substituting the proline residue at position 331 with an alanine residue (P331A).

[0357] In one embodiment, the Fc region is modified by substituting the proline residue at position 331 with a serine residue (P331S).

[0358] In one embodiment, a CD19 binding molecule comprises an Fc domain derived from IgG4. IgG4 has a naturally lower complement activation profile than IgG1, but also weaker binding of FcγR. Thus, in one embodiment, the CD19 binding molecule comprises an IgG4 Fc domain and also comprises one or more modifications that increase FcγR binding.

[0359] It will be appreciated that any of the modifications listed above can be combined to reduce C1q binding.

[0360] 7.4.1.3. Fc Domains with Altered Disulfide Architecture

[0361] The CD19 binding molecule can include an Fc domain comprising one or more modifications to create and/or remove a cysteine residue. Cysteine residues have an important role in the spontaneous assembly of Fc-based multispecific binding molecules, by forming disulfide bridges between individual pairs of polypeptide monomers. Thus, by altering the number and/or position of cysteine residues, it is possible to modify the structure of the CD19 binding molecule to produce a protein with improved therapeutic properties.

[0362] A CD19 binding molecule of the present disclosure can comprise an Fc domain in which one or both Fc regions, e.g., both Fc regions, comprise a cysteine residue at position 309. In one embodiment, the cysteine residue at position 309 is created by a modification, e.g., for an Fc domain derived from IgG1, the leucine residue at position 309 is substituted with a cysteine residue (L309C), for an Fc domain derived from IgG2, the valine residue at position 309 is substituted with a cysteine residue (V309C).

[0363] In one embodiment, the Fc region is modified by substituting the valine residue at position 308 with a cysteine residue (V308C).

[0364] In one embodiment, two disulfide bonds in the hinge region are removed by mutating a core hinge sequence CPPC (SEQ ID NO: 55) to SPPS (SEQ ID NO: 56).

[0365] 7.4.1.4. Fc Domains with Altered Glycosylation

[0366] In certain aspects, CD19 binding molecules with improved manufacturability are provided that comprise fewer glycosylation sites than a corresponding immunoglobulin. These proteins have less complex post translational glycosylation patterns and are thus simpler and less expensive to manufacture.

[0367] In one embodiment a glycosylation site in the CH2 domain is removed by substituting the asparagine residue at position 297 with an alanine residue (N297A) or a glutamine residue (N297Q). In addition to improved manufacturability, these aglycosyl mutants also reduce FcγR binding as described herein above.

[0368] In some embodiments, a CD19 binding molecule can be made that has an altered type of glycosylation, such as a hypofucosylated antibody having reduced amounts of fucosyl residues or an antibody having increased bisecting GlcNac structures. Such altered glycosylation patterns have been demonstrated to increase the ADCC ability of antibodies. Such carbohydrate modifications can be accomplished by, for example, expressing a CD19 binding molecule in a host cell with altered glycosylation machinery. Cells with altered glycosylation machinery have been described in the art and can be used as host cells in which to express CD19 binding molecules to thereby produce CD19 binding molecules with altered glycosylation. For example, EP 1,176,195 by Hang et al. describes a cell line with a functionally disrupted FUT8 gene, which encodes a fucosyl transferase, such that antibodies expressed in such a cell line exhibit hypofucosylation. PCT Publication WO 03/035835 by Presta describes a variant CHO cell line, Lecl3 cells, with reduced ability to attach fucose to Asn(297)-linked carbohydrates, also resulting in hypofucosylation of antibodies expressed in that host cell (see also Shields et al., 2002, J. Biol. Chem. 277:26733-26740). PCT Publication WO 99/54342 by Umana et al. describes cell lines engineered to express glycoprotein-modifying glycosyl transferases (e.g., beta(1,4)-N acetylglucosaminyltransferase III (GnTIII)) such that antibodies expressed in the engineered cell lines exhibit increased bisecting GlcNac structures which results in increased ADCC activity of the antibodies (see also Umana et al., Nat. Biotech. 17:176-180, 1999).

[0369] 7.4.1.5. Fc Heterodimerization

[0370] Many multispecific molecule formats entail dimerization between two Fc regions that, unlike a native immunoglobulin, are operably linked to non-identical antigen-binding domains (or portions thereof, e.g., a VH or VH-CH1 of a Fab). Inadequate heterodimerization of two Fc regions to form an Fc domain has always been an obstacle for increasing the yield of desired multispecific molecules and represents challenges for purification. A variety of approaches available in the art can be used in for enhancing dimerization of Fc regions that might be present in the CD19 binding molecules (and particularly in the MBMs of the disclosure), for example as disclosed in EP 1870459A1; U.S. Pat. Nos. 5,582,996; 5,731,168; 5,910,573; 5,932,448; 6,833,441; 7,183,076; U.S. Patent Application Publication No. 2006204493A1; and PCT Publication No. WO2009/089004A1.

[0371] The present disclosure provides CD19 binding molecules comprising Fc heterodimers, i.e., Fc domains comprising heterologous, non-identical Fc regions. Heterodimerization strategies are used to enhance dimerization of Fc regions operably linked to different ABMs (or portions thereof, e.g., a VH or VH-CH1 of a Fab) and reduce dimerization of Fc regions operably linked to the same ABM or portion thereof. Typically, each Fc region in the Fc heterodimer comprises a CH3 domain of an antibody. The CH3 domains are derived from the constant region of an antibody of any isotype, class or subclass, and in some cases, of IgG (IgG1, IgG2, IgG3 and IgG4) class, as described in the preceding section.

[0372] Typically, the MBMs comprise other antibody fragments in addition to CH3 domains, such as, CH1 domains, CH2 domains, hinge domain, VH domain(s), VL domain(s), CDR(s), and/or antigen-binding fragments described herein. In some embodiments, the two hetero-polypeptides are two heavy chains forming a bispecific or multispecific molecules. Heterodimerization of the two different heavy chains at CH3 domains give rise to the desired antibody or antibody-like molecule, while homodimerization of identical heavy chains will reduce yield of the desired antibody or molecule. In an exemplary embodiment, the two or more hetero-polypeptide chains comprise two chains comprising CH3 domains and forming the molecules of any of the multispecific molecule formats described above of the present disclosure. In an embodiment, the two hetero-polypeptide chains comprising CH3 domains comprise modifications that favor heterodimeric association of the polypeptides, relative to unmodified chains. Various examples of modification strategies are provided below in Table 4 and Sections 7.4.1.5.1 to 7.4.1.5.7.

TABLE 4
Fc Heterodimerization Strategies

| NO. | STRATEGY | CH3 DOMAIN 1 | CH3 DOMAIN 2 | REFERENCES |
|---|---|---|---|---|
| Fc 1 | knobs-into-holes | T366Y | Y407T | Ridgway et al., 1996, |
| | (Y-T) | | | Protein Eng 9: 617- |
| | | | | 21 |
| Fc 2 | knobs-into-holes | S354C, T366W | Y349C, T366S, | Atwell et al., 1997, J |
| | (CW-CSAV) | | L368A, Y407V | Mol Biol. 270(1): 26- |
| | | | | 35; Merchant et al., |
| | | | | 1998, Nat Biotechnol |
| | | | | 16: 677-681 |
| Fc 3 | HA-TF | S364H, F405A | Y349T, T394F | Moore et al., 2011, |
| | | | | MAbs 3(6): 546-57 |
| Fc 4 | ZW1 (VYAV- | T350V, L351Y, | T350V, T366L, | Von Kreudenstein et |
| | VLLW) | F405A, Y407V | K392L, T394W | al., 2013, MAbs |
| | | | | 5: 646-54 |
| Fc 5 | CH3 charge pairs | K392D, K409D | E356K, D399K | Gunasekaran et al., |
| | (DD-KK) | | | 2010, J Biol Chem |
| | | | | 285: 19637-46 |
| Fc 6 | IgG1 hingE, CH3 | IgG1: D221E, | IgG1: D221R, | Strop et al., 2012, J |
| | charge pairs (EEE- | P228E, L368E | P228R, K409R | Mol Biol 420: 204-19 |
| | RRR) | | | |
| Fc 7 | IgG2 hingE, CH3 | IgG2: C223E, | IgG2: C223R, | Strop et al., 2012, J |
| | charge pairs (EEE- | P228E, L368E | E225R, P228R, | Mol Biol 420: 204-19 |
| | RRRR) | | K409R | |
| Fc 8 | EW-RVT | K360E, K409W, | Q347R, D399V, | Choi et al., 2013, |
| | | | F405T | Mol Cancer Ther |
| | | | | 12: 2748-59 |
| Fc 9 | EW-RVTS-S | K360E, K409W, | Q347R, D399V, | Choi et al., 2015, |
| | | Y349C | F405T, S354C | Mol Immunol |
| | | | | 65: 377-83 |
| Fc 10 | Biclonic | 366K (+351K) | 351D or E or D at | Geuijen et al., 2014, |
| | | | 349, 368, 349, or | Journal of Clinical |
| | | | 349 + 355 | Oncology |
| | | | | 32: suppl: 560 |
| Fc 11 | DuoBody (L-R) | F405L | K409R | Labrijn et al., 2013, |
| | | | | Proc Natl Acad Sci |
| | | | | USA 110: 5145-50 |
| Fc 12 | SEEDbody | IgG/A chimera | IgG/A chimera | Davis et al., 2010, |
| | | | | Protein Eng Des Sel |
| | | | | 23: 195-202 |
| Fc 13 | BEAT | residues from | residues from | Moretti et al., 2013, |
| | | TCRα interface | TCRβ interface | BMC Proceedings |
| | | | | 7(Suppl 6): 09 |
| Fc 14 | 7.8.60 (DMA- | K360D, D399M, | E345R, Q347R, | Leaver-Fey et al., |
| | RRVV) | Y407A | T366V, K409V | Structure 24: 641-51 |
| Fc 15 | 20.8.34 (SYMV- | Y349S, K370Y, | E356G, E357D, | Leaver-Fey et al., |
| | GDQA) | T366M, K409V | S364Q, Y407A | Structure 24: 641-51 |
| Fc 16 | Skew variant | None | None | FIG. 34 of US |
| | 12757 | | | 2016/0355600 |
| Fc 17 | Skew variant | L368D, K370S | S364K | FIG. 34 of US |
| | 12758 | | | 2016/0355600 |
| Fc 18 | Skew variant | L368D, K370S | S364K, E357L | FIG. 34 of US |
| | 12759 | | | 2016/0355600 |
| Fc 19 | Skew variant | L368D, K370S | S364K, E357Q | FIG. 34 of US |
| | 12760 | | | 2016/0355600 |
| Fc 20 | Skew variant | T411E, K360E, | D401K | FIG. 34 of US |
| | 12761 | Q362E | | 2016/0355600 |
| Fc 21 | Skew variant | L368E, K370S | S364K | FIG. 34 of US |
| | 12496 | | | 2016/0355600 |
| Fc 22 | Skew variant | K370S | S364K | FIG. 34 of US |
| | 12511 | | | 2016/0355600 |
| Fc 23 | Skew variant | L368E, K370S | S364K, E357Q | FIG. 34 of US |
| | 12840 | | | 2016/0355600 |
| Fc 24 | Skew variant | K370S | S364K, E357Q | FIG. 34 of US |
| | 12841 | | | 2016/0355600 |
| Fc 25 | Skew variant | L368E, K370S | S364K | FIG. 34 of US |
| | 12894 | | | 2016/0355600 |
| Fc 26 | Skew variant | K370S | S364K | FIG. 34 of US |
| | 12895 | | | 2016/0355600 |
| Fc 27 | Skew variant | L368E, K370S | S364K, E357Q | FIG. 34 of US |
| | 12896 | | | 2016/0355600 |
| Fc 28 | Skew variant | K370S | S364K, E357Q | FIG. 34 of US |
| | 12901 | | | 2016/0355600 |
| Fc 29 | pl_ISO(−) | I199T, N203D, | | FIG. 31 of US |
| | | K274Q, R355Q, | | 2016/0355600 |
| | | N384S, K392N, | | |
| | | V397M, Q419E, | | |
| | | DEL447 | | |
| Fc 30 | pl_(−)_Isosteric_A | N208D, Q295E, | | FIG. 31 of US |
| | | N384D, Q418E, | | 2016/0355600 |
| | | N421D | | |
| Fc 31 | pl_(−)_isosteric_B | N208D, Q295E, | | FIG. 31 of US |
| | | Q418E, N421D | | 2016/0355600 |
| Fc 32 | pl_ISO(+RR) | Q196K, I199T, | | FIG. 31 of US |
| | | P217R, P228R, | | 2016/0355600 |
| | | N276K | | |
| Fc 33 | pl_ISO(+) | Q196K, I199T, | | FIG. 31 of US |
| | | N276K | | 2016/0355600 |
| Fc 34 | pl_(+) isosteric_A | E269Q, E272Q, | | FIG. 31 of US |
| | | E283Q, E357Q, | | 2016/0355600 |
| Fc 35 | pl_(+)_isosteric_B | E269Q, E272Q, | | FIG. 31 of US |
| | | E283Q | | 2016/0355600 |
| Fc 36 | pl_(+) | E269Q, E272Q | | FIG. 31 of US |
| | isosteric_E269Q, | | | 2016/0355600 |
| | E272Q | | | |
| Fc 37 | pl_(+)_isosteric_E2 | E269Q, E283Q | | FIG. 31 of US |
| | 69Q, E283Q | | | 2016/0355600 |
| Fc 38 | pl_(+) | E272Q, E283Q | | FIG. 31 of US |
| | isosteric_E2720, | | | 2016/0355600 |
| | E283Q | | | |
| Fc 39 | pl_(+)_isosteric_E2 | E269Q | | FIG. 31 of US |
| | 69Q | | | 2016/0355600 |
| Fc 40 | Heterodimerization | F405A | T394F | FIG. 30A of US |
| | | | | 2016/0355600 |
| Fc 41 | Heterodimerization | S364D | Y349K | FIG. 30A of US |
| | | | | 2016/0355600 |
| Fc 42 | Heterodimerization | S364E | L368K | FIG. 30A of US |
| | | | | 2016/0355600 |
| Fc 43 | Heterodimerization | S364E | Y349K | FIG. 30A of US |
| | | | | 2016/0355600 |
| Fc 44 | Heterodimerization | S364F | K370G | FIG. 30A of US |
| | | | | 2016/0355600 |
| Fc 45 | Heterodimerization | S364H | Y349K | FIG. 30A of US |
| | | | | 2016/0355600 |
| Fc 46 | Heterodimerization | S364H | Y349T | FIG. 30A of US |
| | | | | 2016/0355600 |
| Fc 47 | Heterodimerization | S364Y | K370G | FIG. 30A of US |
| | | | | 2016/0355600 |
| Fc 48 | Heterodimerization | T411K | K370E | FIG. 30A of US |
| | | | | 2016/0355600 |
| Fc 49 | Heterodimerization | V397S, F405A | T394F | FIG. 30A of US |
| | | | | 2016/0355600 |
| Fc 50 | Heterodimerization | K370R, T411K | K370E, T411E | FIG. 30A of US |
| | | | | 2016/0355600 |
| Fc 51 | Heterodimerization | L351E, S364D | Y349K, L351K | FIG. 30A of US |
| | | | | 2016/0355600 |
| Fc 52 | Heterodimerization | L351E, S364E | Y349K, L351K | FIG. 30A of US |
| | | | | 2016/0355600 |
| Fc 53 | Heterodimerization | L351E, T366D | L351K, T366K | FIG. 30A of US |
| | | | | 2016/0355600 |
| Fc 54 | Heterodimerization | P395T, V397S, | T394F | FIG. 30A of US |
| | | F405A | | 2016/0355600 |
| Fc 55 | Heterodimerization | S364D, K370G | S364Y, K370R | FIG. 30A of US |
| | | | | 2016/0355600 |
| Fc 56 | Heterodimerization | S364D, T394F | Y349K, F405A | FIG. 30A of US |
| | | | | 2016/0355600 |
| Fc 57 | Heterodimerization | S364E, F405A | Y349K, T394F | FIG. 30A of US |
| | | | | 2016/0355600 |
| Fc 58 | Heterodimerization | S364E, F405S | Y349K, T394Y | FIG. 30A of US |
| | | | | 2016/0355600 |
| Fc 59 | Heterodimerization | S364E, T411E | Y349K, D401K | FIG. 30A of US |
| | | | | 2016/0355600 |
| Fc 60 | Heterodimerization | S364H, D401K | Y349T, T411E | FIG. 30A of US |
| | | | | 2016/0355600 |
| Fc 61 | Heterodimerization | S364H, F405A | Y349T, T394F | FIG. 30A of US |
| | | | | 2016/0355600 |
| Fc 62 | Heterodimerization | S364H, T394F | Y349T, F405A | FIG. 30A of US |
| | | | | 2016/0355600 |
| Fc 63 | Heterodimerization | Y349C, S364E | Y349K, S354C | FIG. 30A of US |
| | | | | 2016/0355600 |
| Fc 64 | Heterodimerization | L351E, S364D, | Y349K, L351K, | FIG. 30A of US |
| | | F405A | T394F | 2016/0355600 |
| Fc 65 | Heterodimerization | L351K, S364H, | Y349T, L351E, | FIG. 30A of US |
| | | D401K | T411E | 2016/0355600 |
| Fc 66 | Heterodimerization | S364E, T411E, | Y349K, T394F, | FIG. 30A of US |
| | | F405A | D401K | 2016/0355600 |
| Fc 67 | Heterodimerization | S364H, D401K, | Y349T, T394F, | FIG. 30A of US |
| | | F405A | T411E | 2016/0355600 |
| Fc 68 | Heterodimerization | S364H, F405A, | Y349T, T394F, | FIG. 30A of US |
| | | T411E | D401K | 2016/0355600 |
| Fc 69 | Heterodimerization | T411E, K360E, | D401K | FIG. 30C of US |
| | | N390D | | 2016/0355600 |
| Fc 70 | Heterodimerization | T411E, Q362E, | D401K | FIG. 30C of US |
| | | N390D | | 2016/0355600 |
| Fc 71 | Heterodimerization | T411E, Q347R | D401K, K360D | FIG. 30C of US |
| | | | | 2016/0355600 |
| Fc 72 | Heterodimerization | T411E, Q347R | D401K, K360E | FIG. 30C of US |
| | | | | 2016/0355600 |
| Fc 73 | Heterodimerization | T411E, K360 | D401K, Q347K | FIG. 30C of US |
| | | | | 2016/0355600 |
| Fc 74 | Heterodimerization | T411E, K360D | D401K, Q347R | FIG. 30C of US |
| | | | | 2016/0355600 |
| Fc 75 | Heterodimerization | T411E, K360E | D401K, Q347K | FIG. 30C of US |
| | | | | 2016/0355600 |
| Fc 76 | Heterodimerization | T411E, K360E | D401K, Q347R | FIG. 30C of US |
| | | | | 2016/0355600 |
| Fc 77 | Heterodimerization | T411E, S364K | D401K, K370S | FIG. 30C of US |
| | | | | 2016/0355600 |
| Fc 78 | Heterodimerization | T411E, K370S | D401K, S364K | FIG. 30C of US |
| | | | | 2016/0355600 |
| Fc 79 | Heterodimerization | Q347E | E357Q | FIG. 30C of US |
| | | | | 2016/0355600 |
| Fc 80 | Heterodimerization | Q347E | E357Q, Q362K | FIG. 30C of US |
| | | | | 2016/0355600 |
| Fc 81 | Heterodimerization | K360D, Q362E | Q347R | FIG. 30C of US |
| | | | | 2016/0355600 |
| Fc 82 | Heterodimerization | K360D, Q362E | D401K | FIG. 30C of US |
| | | | | 2016/0355600 |
| Fc 83 | Heterodimerization | K360D, Q362E | Q347R, D401K | FIG. 30C of US |
| | | | | 2016/0355600 |
| Fc 84 | Heterodimerization | K360E, Q362E | Q347R | FIG. 30C of US |
| | | | | 2016/0355600 |
| Fc 85 | Heterodimerization | K360E, Q362E | D401K | FIG. 30C of US |
| | | | | 2016/0355600 |
| Fc 86 | Heterodimerization | K360E, Q362E | Q347R, D401K | FIG. 30C of US |
| | | | | 2016/0355600 |
| Fc 87 | Heterodimerization | Q362E, N390D | D401K | FIG. 30C of US |
| | | | | 2016/0355600 |
| Fc 88 | Heterodimerization | Q347E, K360D | D401N | FIG. 30C of US |
| | | | | 2016/0355600 |
| Fc 89 | Heterodimerization | K360D | Q347R, N390K | FIG. 30C of US |
| | | | | 2016/0355600 |
| Fc 90 | Heterodimerization | K360D | N390K, D401N | FIG. 30C of US |
| | | | | 2016/0355600 |
| Fc 91 | Heterodimerization | K360E | Y349H | FIG. 30C of US |
| | | | | 2016/0355600 |
| Fc 92 | Heterodimerization | K370S, Q347E | S364K | FIG. 30C of US |
| | | | | 2016/0355600 |
| Fc 93 | Heterodimerization | K370S, E357L | S364K | FIG. 30C of US |
| | | | | 2016/0355600 |
| Fc 94 | Heterodimerization | K370S, E357Q | S364K | FIG. 30C of US |
| | | | | 2016/0355600 |
| Fc 95 | Heterodimerization | K370S, Q347E, | S364K | FIG. 30C of US |
| | | E357L | | 2016/0355600 |
| Fc 96 | Heterodimerization | K370S, Q347E, | S364K | FIG. 30C of US |
| | | E357Q | | 2016/0355600 |
| Fc 97 | Heterodimerization | L368D, K370S, | S364K | FIG. 30D of US |
| | | Q347E | | 2016/0355600 |
| Fc 98 | Heterodimerization | L368D, K370S, | S364K | FIG. 30D of US |
| | | E357L | | 2016/0355600 |
| Fc 99 | Heterodimerization | L368D, K370S, | S364K | FIG. 30D of US |
| | | E357Q | | 2016/0355600 |
| Fc 100 | Heterodimerization | L368D, K370S, | S364K | FIG. 30D of US |
| | | Q347E, E357L | | 2016/0355600 |
| Fc 101 | Heterodimerization | L368D, K370S, | S364K | FIG. 30D of US |
| | | Q347E, E357Q | | 2016/0355600 |
| Fc 102 | Heterodimerization | L368E, K370S, | S364K | FIG. 30D of US |
| | | Q347E | | 2016/0355600 |
| Fc 103 | Heterodimerization | L368E, K370S, | S364K | FIG. 30D of US |
| | | E357L | | 2016/0355600 |
| Fc 104 | Heterodimerization | L368E, K370S, | S364K | FIG. 30D of US |
| | | E357Q | | 2016/0355600 |
| Fc 105 | Heterodimerization | L368E, K370S, | S364K | FIG. 30D of US |
| | | Q347E, E357L | | 2016/0355600 |
| Fc 106 | Heterodimerization | L368E, K370S, | S364K | FIG. 30D of US |
| | | Q347E, E357Q | | 2016/0355600 |
| Fc 107 | Heterodimerization | L368D, K370T, | S364K | FIG. 30D of US |
| | | Q347E | | 2016/0355600 |
| Fc 108 | Heterodimerization | L368D, K370T, | S364K | FIG. 30D of US |
| | | E357L | | 2016/0355600 |
| Fc 109 | Heterodimerization | L368D, K370T, | S364K | FIG. 30D of US |
| | | E357Q | | 2016/0355600 |
| Fc 110 | Heterodimerization | L368D, K370T, | S364K | FIG. 30D of US |
| | | Q347E, E357L | | 2016/0355600 |
| Fc 111 | Heterodimerization | L368D, K370T, | S364K | FIG. 30D of US |
| | | Q347E, E357Q | | 2016/0355600 |
| Fc 112 | Heterodimerization | L368E, K370T, | S364K | FIG. 30D of US |
| | | Q347E | | 2016/0355600 |
| Fc 113 | Heterodimerization | L368E, K370T, | S364K | FIG. 30D of US |
| | | E357L | | 2016/0355600 |
| Fc 114 | Heterodimerization | L368E, K370T, | S364K | FIG. 30D of US |
| | | E357Q | | 2016/0355600 |
| Fc 115 | Heterodimerization | L368E, K370T, | S364K | FIG. 30D of US |
| | | Q347E, E357L | | 2016/0355600 |
| Fc 116 | Heterodimerization | L368E, K370T, | S364K | FIG. 30D of US |
| | | Q347E, E357Q | | 2016/0355600 |
| Fc 117 | Heterodimerization | T411E, Q362E | D401K, T411K | FIG. 30D of US |
| | | | | 2016/0355600 |
| Fc 118 | Heterodimerization | T411E, N390D | D401K, T411K | FIG. 30D of US |
| | | | | 2016/0355600 |
| Fc 119 | Heterodimerization | T411E, Q362E | D401R, T411R | FIG. 30D of US |
| | | | | 2016/0355600 |
| Fc 120 | Heterodimerization | T411E, N390D | D401R, T411R | FIG. 30D of US |
| | | | | 2016/0355600 |
| Fc 121 | Heterodimerization | Y407T | T366Y | FIG. 30D of US |
| | | | | 2016/0355600 |
| Fc 122 | Heterodimerization | F405A | T394W | FIG. 30D of US |
| | | | | 2016/0355600 |
| Fc 123 | Heterodimerization | T366Y, F405A | T394W, Y407T | FIG. 30D of US |
| | | | | 2016/0355600 |
| Fc 124 | Heterodimerization | T366S, L368A, | T366W | FIG. 30D of US |
| | | Y407V | | 2016/0355600 |
| Fc 125 | Heterodimerization | T366S, L368A, | T366W, S354C | FIG. 30D of US |
| | | Y407V, Y349C | | 2016/0355600 |
| Fc 126 | Heterodimerization | K392D, K409D | E356K, D399K | FIG. 30E of US |
| | | | | 2016/0355600 |
| Fc 127 | Heterodimerization | K370D, K392D, | E356K, E357K, | FIG. 30E of US |
| | | K409D | D399K | 2016/0355600 |
| Fc 128 | Heterodimerization | I199T, N203D, | Q196K, L99T, | FIG. 30E of US |
| | | K247Q, R355Q, | P217R, P228R, | 2016/0355600 |
| | | N384S, K392N, | N276K | |
| | | V397M, Q419E, | | |
| | | K447 | | |
| Fc 129 | Heterodimerization | I199T, N203D, | Q196K, L99T, | FIG. 30E of US |
| | | K247Q, R355Q, | N276K | 2016/0355600 |
| | | N384S, K392N, | | |
| | | V397M, Q419E, | | |
| | | K447 | | |
| Fc 130 | Heterodimerization | N384S, K392N, | N276K | FIG. 30E of US |
| | | V397M, Q419E | | 2016/0355600 |
| Fc 131 | Heterodimerization | D221E, P228E, | D221R, P228R, | FIG. 30E of US |
| | | L368E | K409R | 2016/0355600 |
| Fc 132 | Heterodimerization | C220E, P228E, | C220R, E224R, | FIG. 30E of US |
| | | L368E | P228R, K409R | 2016/0355600 |
| Fc 133 | Heterodimerization | F405L | K409R | FIG. 30E of US |
| | | | | 2016/0355600 |
| Fc 134 | Heterodimerization | T366I, K392M, | F405A, Y407V | FIG. 30E of US |
| | | T394W | | 2016/0355600 |
| Fc 135 | Heterodimerization | T366V, K409F | L351Y, Y407A | FIG. 30E of US |
| | | | | 2016/0355600 |
| Fc 136 | Heterodimerization | T366A, K392E, | D399R, S400R, | FIG. 30E of US |
| | | K409F, T411E | Y407A | 2016/0355600 |
| Fc 137 | Heterodimerization | L351K | L351E | FIG. 30E of US |
| | | | | 2016/0355600 |
| Fc 138 | Heterodimerization | I199T, N203D, | Q196K, L199T, | FIG. 30E of US |
| | | K247Q, R355Q, | P217R, P228R, | 2016/0355600 |
| | | Q419E, K447 | N276K | |
| Fc 139 | Heterodimerization | I199T, N203D, | Q196K, I199T, | FIG. 30E of US |
| | | K247Q, R355Q, | N276K | 2016/0355600 |
| | | Q419E, K447 | | |
| Fc 140 | Heterodimerization | I199T, N203D, | | FIG. 30E of US |
| | | K274Q, R355Q, | | 2016/0355600 |
| | | N384S, K392N, | | |
| | | V397M, Q419E | | |
| | | DEL447 | | |
| Fc 141 | Heterodimerization | N208D, Q295E | | FIG. 30E of US |
| | | N384D, Q418E | | 2016/0355600 |
| | | N421D | | |
| Fc 142 | Heterodimerization | N208D, Q295E | | FIG. 30E of US |
| | | Q418E, N421D | | 2016/0355600 |
| Fc 143 | Heterodimerization | Q196K, I199T | | FIG. 30E of US |
| | | P217R, P228R | | 2016/0355600 |
| | | N276K | | |
| Fc 144 | Heterodimerization | Q196K, I199T | | FIG. 30E of US |
| | | N276K | | 2016/0355600 |
| Fc 145 | Heterodimerization | E269Q, E272Q | | FIG. 30E of US |
| | | E283Q, E357Q | | 2016/0355600 |
| Fc 146 | Heterodimerization | E269Q, E272Q | | FIG. 30E of US |
| | | E283Q, | | 2016/0355600 |
| Fc 147 | Heterodimerization | E269Q, E272Q | | FIG. 30E of US |
| | | | | 2016/0355600 |
| Fc 148 | Heterodimerization | E269Q, E283Q | | FIG. 30E of US |
| | | | | 2016/0355600 |
| Fc 149 | Heterodimerization | E272Q, E283Q | | FIG. 30E of US |
| | | | | 2016/0355600 |
| Fc 150 | Heterodimerization | E269Q | | FIG. 30E of US |
| | | | | 2016/0355600 |

[0373] Exemplary pairs of heterologous, non-identical Fc sequences that can pair to form a Fc heterodimer, and which can be included in CD19 binding molecules of the disclosure, include

(i) SEQ ID NO: 1106 and SEQ ID NO: 1107, and
(ii) SEQ ID NO: 1106 and SEQ ID NO: 1108.
(SEQ ID NO: 1106)
DKTHTCPPCPAPELLGGPSVFLFPPKPKDTLMISRTPEVTCVVVDVSHED
PEVKFNWYVDGVEVHNAKTKPREEQYNSTYRVVSVLTVLHQDWLNGKEYK
CKVSNKALPAPIEKTISKAKGQPREPQVCTLPPSREEMTKNQVSLSCAVK
GFYPSDIAVEWESNGQPENNYKTTPPVLDSDGSFFLVSKLTVDKSRWQQG
NVFSCSVMHEALHNHYTQKSLSLSPGK
(SEQ ID NO: 1107)
DKTHTCPPCPAPELLGGPSVFLFPPKPKDTLMISRTPEVTCVVVDVSHED
PEVKFNWYVDGVEVHNAKTKPREEQYNSTYRVVSVLTVLHQDWLNGKEYK
CKVSNKALPAPIEKTISKAKGQPREPQVYTLPPCREEMTKNQVSLWCLVK
GFYPSDIAVEWESNGQPENNYKTTPPVLDSDGSFFLYSKLTVDKSRWQQG
NVFSCSVMHEALHNHYTQKSLSLSPGK
(SEQ ID NO: 1108)
DKTHTCPPCPAPELLGGPSVFLFPPKPKDTLMISRTPEVTCVVVDVSHED
PEVKFNWYVDGVEVHNAKTKPREEQYNSTYRVVSVLTVLHQDWLNGKEYK
CKVSNKALPAPIEKTISKAKGQPREPQVYTLPPCREEMTKNQVSLWCLVK
GFYPSDIAVEWESNGQPENNYKTTPPVLDSDGSFFLYSKLTVDKSRWQQG
NVFSCSVMHEALHNRYTQKSLSLSPGK

[0374] An Fc region having an amino acid sequence of one of SEQ ID NOS: 1106-1108 can be modified to include one or more of the substitutions described in Section 7.4.1 (including its subparts), for example to include the substitution(s) corresponding to an ablation variant set forth in Table 3. In some embodiments, a CD19 binding molecule comprises an Fc region having an amino acid sequence of one of SEQ ID NOs:1106-1108 with a mutation at 1, 2, 3, 4, 5, 6, or more than 6 of positions 233, 234, 235, 236, 237, 239, 265, 266, 267, 268, 269, 297, 299, 322, 327, 328, 329, 330, 331 and 332 (EU numbering), for example mutation(s) described in Section 7.4.1 (including its subparts). For example, a CD19 binding molecule can comprise an Fc region having an amino acid sequence of SEQ ID NO:1106 with a mutation at 1, 2, 3, 4, 5, 6, or more than 6 of positions 233, 234, 235, 236, 237, 239, 265, 266, 267, 268, 269, 297, 299, 322, 327, 328, 329, 330, 331 and 332 and/or an Fc region having an amino acid sequence of SEQ ID NO:1107 with a mutation at 1, 2, 3, 4, 5, 6, or more than 6 of positions 233, 234, 235, 236, 237, 239, 265, 266, 267, 268, 269, 297, 299, 322, 327, 328, 329, 330, 331 and 332 and/or an Fc region having an amino acid sequence of SEQ ID NO:1108 with a mutation at 1, 2, 3, 4, 5, 6, or more than 6 of positions 233, 234, 235, 236, 237, 239, 265, 266, 267, 268, 269, 297, 299, 322, 327, 328, 329, 330, 331 and 332.

[0375] 7.4.1.5.1. Steric Variants

[0376] CD19 binding molecules can comprise one or more, e.g., a plurality, of modifications to one or more of the constant domains of an Fc domain, e.g., to the CH3 domains. In one example, a CD19 binding molecule of the present disclosure comprises two polypeptides that each comprise a heavy chain constant domain of an antibody, e.g., a CH2 or CH3 domain. In an example, the two heavy chain constant domains, e.g., the CH2 or CH3 domains of the CD19 binding molecule comprise one or more modifications that allow for a heterodimeric association between the two chains. In one aspect, the one or more modifications are disposed on CH2 domains of the two heavy chains. In one aspect, the one or more modifications are disposed on CH3 domains of at least two polypeptides of the CD19 binding molecule.

[0377] One mechanism for Fc heterodimerization is generally referred to as “knobs and holes” or “knobs-into-holes”. These terms refer to amino acid mutations that create steric influences to favor formation of Fc heterodimers over Fc homodimers, as described in, e.g., Ridgway et al., 1996, Protein Engineering 9(7):617; Atwell et al., 1997, J. Mol. Biol. 270:26; U.S. Pat. No. 8,216,805. Knob-in-hole mutations can be combined with other strategies to improve heterodimerization.

[0378] In one aspect, the one or more modifications to a first polypeptide of the CD19 binding molecule comprising a heavy chain constant domain can create a “knob” and the one or more modifications to a second polypeptide of the CD19 binding molecule creates a “hole,” such that heterodimerization of the polypeptide of the CD19 binding molecule comprising a heavy chain constant domain causes the “knob” to interface (e.g., interact, e.g., a CH2 domain of a first polypeptide interacting with a CH2 domain of a second polypeptide, or a CH3 domain of a first polypeptide interacting with a CH3 domain of a second polypeptide) with the “hole.” The knob projects from the interface of a first polypeptide of the CD19 binding molecule comprising a heavy chain constant domain and is therefore positionable in a compensatory “hole” in the interface with a second polypeptide of the CD19 binding molecule comprising a heavy chain constant domain so as to stabilize the heteromultimer, and thereby favor heteromultimer formation over homomultimer formation, for example. The knob can exist in the original interface or can be introduced synthetically (e.g. by altering nucleic acid encoding the interface). The import residues for the formation of a knob are generally naturally occurring amino acid residues and can be selected from arginine (R), phenylalanine (F), tyrosine (Y) and tryptophan (W). In some cases, tryptophan and tyrosine are selected. In an embodiment, the original residue for the formation of the protuberance has a small side chain volume, such as alanine, asparagine, aspartic acid, glycine, serine, threonine or valine.

[0379] A “hole” comprises at least one amino acid side chain which is recessed from the interface of a second polypeptide of the CD19 binding molecule comprising a heavy chain constant domain and therefore accommodates a corresponding knob on the adjacent interfacing surface of a first polypeptide of the CD19 binding molecule comprising a heavy chain constant domain. The hole can exist in the original interface or can be introduced synthetically (e.g. by altering nucleic acid encoding the interface). The import residues for the formation of a hole are usually naturally occurring amino acid residues and are in some embodiments selected from alanine (A), serine (S), threonine (T) and valine (V). In one embodiment, the amino acid residue is serine, alanine or threonine. In another embodiment, the original residue for the formation of the hole has a large side chain volume, such as tyrosine, arginine, phenylalanine or tryptophan.

[0380] In an embodiment, a first CH3 domain is modified at residue 366, 405 or 407 to create either a “knob” or a hole” (as described above), and the second CH3 domain that heterodimerizes with the first CH3 domain is modified at: residue 407 if residue 366 is modified in the first CH3 domain, residue 394 if residue 405 is modified in the first CH3 domain, or residue 366 if residue 407 is modified in the first CH3 domain to create a “hole” or “knob” complementary to the “knob” or “hole” of the first CH3 domain.

[0381] In another embodiment, a first CH3 domain is modified at residue 366, and the second CH3 domain that heterodimerizes with the first CH3 domain is modified at residues 366, 368 and/or 407, to create a “hole” or “knob” complementary to the “knob” or “hole” of the first CH3 domain. In one embodiment, the modification to the first CH3 domain introduces a tyrosine (Y) residue at position 366. In an embodiment, the modification to the first CH3 is T366Y. In one embodiment, the modification to the first CH3 domain introduces a tryptophan (W) residue at position 366. In an embodiment, the modification to the first CH3 is T366W. In some embodiments, the modification to the second CH3 domain that heterodimerizes with the first CH3 domain modified at position 366 (e.g., has a tyrosine (Y) or tryptophan (W) introduced at position 366, e.g., comprises the modification T366Y or T366W), comprises a modification at position 366, a modification at position 368 and a modification at position 407. In some embodiments, the modification at position 366 introduces a serine (S) residue, the modification at position 368 introduces an alanine (A), and the modification at position 407 introduces a valine (V). In some embodiments, the modifications comprise T366S, L368A and Y407V. In one embodiment, the first CH3 domain of the multispecific molecule comprises the modification T366Y, and the second CH3 domain that heterodimerizes with the first CH3 domain comprises the modifications T366S, L368A and Y407V, or vice versa. In one embodiment, the first CH3 domain of the multispecific molecule comprises the modification T366W, and the second CH3 domain that heterodimerizes with the first CH3 domain comprises the modifications T366S, L368A and Y407V, or vice versa.

[0382] Additional steric or “skew” (e.g., knob in hole) modifications are described in PCT publication no. WO2014/145806 (for example, FIG. 3, FIG. 4 and FIG. 12 of WO2014/145806), PCT publication no. WO2014/110601, and PCT publication no. WO 2016/086186, WO 2016/086189, WO 2016/086196 and WO 2016/182751. An example of a KIH variant comprises a first constant chain comprising a L368D and a K370S modification, paired with a second constant chain comprising a S364K and E357Q modification.

[0383] Additional knob in hole modification pairs suitable for use in any of the CD19 binding molecules of the present disclosure are further described in, for example, WO1996/027011, and Merchant et al., 1998, Nat. Biotechnol., 16:677-681.

[0384] In further embodiments, the CH3 domains can be additionally modified to introduce a pair of cysteine residues. Without being bound by theory, it is believed that the introduction of a pair of cysteine residues capable of forming a disulfide bond provide stability to heterodimerized CD19 binding molecules, e.g., MBMs, comprising paired CH3 domains. In some embodiments, the first CH3 domain comprises a cysteine at position 354, and the second CH3 domain that heterodimerizes with the first CH3 domain comprises a cysteine at position 349. In some embodiments, the first CH3 domain comprises a cysteine at position 354 (e.g., comprises the modification S354C) and a tyrosine (Y) at position 366 (e.g., comprises the modification T366Y), and the second CH3 domain that heterodimerizes with the first CH3 domain comprises a cysteine at position 349 (e.g., comprises the modification Y349C), a serine at position 366 (e.g., comprises the modification T366S), an alanine at position 368 (e.g., comprises the modification L368A), and a valine at position 407 (e.g., comprises the modification Y407V). In some embodiments, the first CH3 domain comprises a cysteine at position 354 (e.g., comprises the modification S354C) and a tryptophan (W) at position 366 (e.g., comprises the modification T366W), and the second CH3 domain that heterodimerizes with the first CH3 domain comprises a cysteine at position 349 (e.g., comprises the modification Y349C), a serine at position 366 (e.g., comprises the modification T366S), an alanine at position 368 (e.g., comprises the modification L368A), and a valine at position 407 (e.g., comprises the modification Y407V).

[0385] An additional mechanism that finds use in the generation of heterodimers is sometimes referred to as “electrostatic steering” as described in Gunasekaran et al., 2010, J. Biol. Chem. 285(25):19637. This is sometimes referred to herein as “charge pairs”. In this embodiment, electrostatics are used to skew the formation towards heterodimerization. As a skilled artisan will appreciate, these can also have an effect on pl, and thus on purification, and thus could in some cases also be considered pl variants. However, as these were generated to force heterodimerization and were not used as purification tools, they are classified as “steric variants”. These include, but are not limited to, D221E/P228E/L368E paired with D221R/P228R/K409R and C220E/P228E/368E paired with C220R/E224R/P228R/K409R.

[0386] Additional variants that can be combined with other variants, optionally and independently in any amount, such as pl variants outlined herein or other steric variants that are shown in FIG. 37 of US 2012/0149876.

[0387] In some embodiments, the steric variants outlined herein can be optionally and independently incorporated with any pl variant (or other variants such as Fc variants, FcRn variants) into one or both Fc regions, and can be independently and optionally included or excluded from the CD19 binding molecules of the disclosure.

[0388] A list of suitable skew variants is found in Table 5 showing some pairs of particular utility in many embodiments. Of particular use in many embodiments are the pairs of sets including, but not limited to, S364K/E357Q: L368D/K370S; L368D/K370S: S364K; L368E/K370S: S364K; T411T/E360E/Q362E: D401K; L368D/K370S: S364K/E357L; and K370S: S364K/E357Q. In terms of nomenclature, the pair “S364K/E357Q: L368D/K370S” means that one of the Fc regions has the double variant set S364K/E357Q and the other has the double variant set L368D/K370S.

TABLE 5
Exemplary skew variants

| Fc region 1 | Fc region 2 |
|---|---|
| F405A | T394F |
| S364D | Y349K |
| S364E | L368K |
| S364E | Y349K |
| S364F | K370G |
| S364H | Y349K |
| S364H | Y349T |
| S364Y | K370G |
| T411K | K370E |
| V397S/F405A | T394F |
| K370R/T411K | K370E/T411E |
| L351E/S364D | Y349K/L351K |
| L351E/S364E | Y349K/L351K |
| L351E/T366D | L351K/T366K |
| P395T/V397S/F405A | T394F |
| S364D/K370G | S364Y/K370R |
| S364D/T394F | Y349K/F405A |
| S364E/F405A | Y349K/T394F |
| S364E/F405S | Y349K/T394Y |
| S364E/T411E | Y349K/D401K |
| S364H/D401K | Y349T/T411E |
| S364H/F405A | Y349T/T394F |
| S364H/T394F | Y349T/F405A |
| Y349C/S364E | Y349K/S354C |
| L351E/S364D/F405A | Y349K/L351K/T394F |
| L351K/S364H/D401K | Y349T/L351E/T411E |
| S364E/T411E/F405A | Y349K/T394F/D401K |
| S364H/D401K/F405A | Y349T/T394F/T411E |
| S364H/F405A/T411E | Y349T/T394F/D401K |
| K370E/T411D | T411K |
| L368E/K409E | L368K |
| Y349T/T394F/S354C | S364H/F405A/Y349C |
| T411E | D401K |
| T411E | D401R/T411R |
| Q347E/K360E | Q347R |
| L368E | S364K |
| L368E/K370S | S364K |
| L368E/K370T | S364K |
| L368E/D401R | S364K |
| L368E/D401N | S364K |
| L368E | E357S/S364K |
| L368E | S364K/K409E |
| L368E | S364K/K409V |
| L368D | S364K |
| L368D/K370S | S364K |
| L368D/K370S | S364K/E357L |
| L368D/K370S | S364K/E357Q |
| T411E/K360E/Q362E | D401K |
| K370S | S364K |
| L368E/K370S | S364K/E357Q |
| K370S | S364K/E357Q |
| T411E/K360D | D401K |
| T411E/K360E | D401K |
| T411E/Q362E | D401K |
| T411E/N390D | D401K |
| T411E | D401K/Q347K |
| T411E | D401K/Q347R |
| T411E/K360D/Q362E | D401K |
| K392D/K409D | E356K/D399K |
| K370D/K392D/K409D | E356K/E357K/D399K |
| I199T/N203D/K247Q/R355Q/N384S/ | Q196K/I199T/P217R/ |
| K392N/V397M/Q419E/K447_{—} | P228R/N276K |
| I199T/N203D/K247Q/R355Q/N384S/ | Q196K/I199T/N276K |
| K392N/V397M/Q419E/K447_{—} | |
| N384S/K392N/V397M/Q419E | N276K |
| D221E/P228E/L368E | D221R/P228R/K409R |
| C220E/P228E/L368E | C220R/E224R/P228R/ |
| | K409R |
| F405L | K409R |
| T366I/K392M/T394W | F405A/Y407V |
| T366V/K409F | L351Y/Y407A |
| T366A/K392E/K409F/T411E | D399R/S400R/Y407A |
| L351K | L351E |
| I199T/N203D/K247Q/R355Q/Q419E/K447 | Q196K/I199T/P217R/ |
| | P228R/N276K |
| I199T/N203D/K247Q/R355Q/Q419E/K447 | Q196K/I199T/N276K |
| I199T N203D K274Q R355Q N384S K392N | |
| V397M Q419E DEL447 | |
| N208D Q295E N384D Q418E N421D | |
| N208D Q295E Q418E N421D | |
| Q196K I199T P217R P228R N276K | |
| Q196K I199T N276K | |
| E269Q E272Q E283Q E357Q | |
| E269Q E272Q E283Q | |
| E269Q E272Q | |
| E269Q E283Q | |
| E272Q E283Q | |
| E269Q | |
| T411E/K360E/N390D | D401K |
| T411E/Q362E/N390D | D401K |
| T411E/Q347R | D401K/K360D |
| T411E/Q347R | D401K/K360E |
| T411E/K360 | D401K/Q347K |
| T411E/K360D | D401K/Q347R |
| T411E/K360E | D401K/Q347K |
| T411E/K360E | D401K/Q347R |
| T411E/S364K | D401K/K370S |
| T411E/K370S | D401K/S364K |
| Q347E | E357Q |
| Q347E | E357Q/Q362K |
| K360D/Q362E | Q347R |
| K360D/Q362E | D401K |
| K360D/Q362E | Q347R/D401K |
| K360E/Q362E | Q347R |
| K360E/Q362E | D401K |
| K360E/Q362E | Q347R/D401K |
| Q362E/N390D | D401K |
| Q347E/K360D | D401N |
| K360D | Q347R/N390K |
| K360D | N390K/D401N |
| K360E | Y349H |
| K370S/Q347E | S364K |
| K370S/E357L | S364K |
| K370S/E357Q | S364K |
| K370S/Q347E/E357L | S364K |
| K370S/Q347E/E357Q | S364K |
| L368D/K370S/Q347E | S364K |
| L368D/K370S/E357L | S364K |
| L368D/K370S/E357Q | S364K |
| L368D/K370S/Q347E/E357L | S364K |
| L368D/K370S/Q347E/E357Q | S364K |
| L368E/K370S/Q347E | S364K |
| L368E/K370S/E357L | S364K |
| L368E/K370S/E357Q | S364K |
| L368E/K370S/Q347E/E357L | S364K |
| L368E/K370S/Q347E/E357Q | S364K |
| L368D/K370T/Q347E | S364K |
| L368D/K370T/E357L | S364K |
| L368D/K370T/E357Q | S364K |
| L368D/K370T/Q347E/E357L | S364K |
| L368D/K370T/Q347E/E357Q | S364K |
| L368E/K370T/Q347E | S364K |
| L368E/K370T/E357L | S364K |
| L368E/K370T/E357Q | S364K |
| L368E/K370T/Q347E/E357L | S364K |
| L368E/K370T/Q347E/E357Q | S364K |
| T411E/Q362E | D401K/T411K |
| T411E/N390D | D401K/T411K |
| T411E/Q362E | D401R/T411R |
| T411E/N390D | D401R/T411R |
| Y407T | T366Y |
| F405A | T394W |
| T366Y/F405A | T394W/Y407T |
| Y407A | T366W |
| T366S/L368A/Y407V | T366W |
| T366S/L368A/Y407V/Y349C | T366W/S354C |
| K392D/K409D | E356K/D399K |
| K370D/K392D/K409D | E356K/E357K/D399K |
| I199T/N203D/K247Q/R355Q/N384S/ | Q196K/I199T/P217R/ |
| K392N/V397M/Q419E/K447_{—} | P228R/N276K |
| I199T/N203D/K247Q/R355Q/N384S/ | Q196K/I199T/N276K/ |
| K392N/V397M/Q419E/K447_{—} | N276K |
| N384S/K392N/V397M/Q419E | |
| D221E/P228E/L368E | D221R/P228R/K409R |
| C220E/P228E/L368E | C220R/E224R/P228R/ |
| | K409R |
| F405L | K409R |
| T366I/K392M/T394W | F405A/Y407V |
| T366V/K409F | L351Y/Y407A |
| T366A/K392E/K409F/T411E | D399R/S400R/Y407A |
| L351K | L351E |
| I199T/N203D/K247Q/R355Q/Q419E/K447_{—} | Q196K/I199T/P217R/ |
| | P228R/N276K |
| I199T/N203D/K247Q/R355Q/Q419E/K447_{—} | Q196K/I199T/N276K |
| I199T N203D K274Q R355Q N384S K392N | |
| V397M Q419E DEL447 | |
| N208D Q295E N384D Q418E N421D | |
| Q295E N384D Q418E N421D | |
| N208D Q295E Q418E N421D | |
| Q295E Q418E N421D | |
| Q196K I199T P217R P228R N276K | |
| Q196K I199T N276K | |
| E269Q E272Q E283Q E357Q | |
| E269Q E272Q E283Q | |
| E269Q E272Q | |
| E269Q E283Q | |
| E272Q E283Q | |
| E269Q | |

[0389] In some embodiments, a CD19 binding molecule comprises a first Fc region and a second Fc region. In some embodiments, the first Fc region comprises the following mutations: L368D and K370S, and the second Fc region comprises the following mutations: S364K and E357Q. In some embodiments, the first Fc region comprises the following mutations: S364K and E357Q, and the second Fc region comprises the following mutations: L368D and K370S.

[0390] 7.4.1.5.2. Alternative Knob and Hole: IgG Heterodimerization

[0391] Heterodimerization of polypeptide chains of a CD19 binding molecule comprising paired CH3 domains can be increased by introducing one or more modifications in a CH3 domain which is derived from the IgG1 antibody class. In an embodiment, the modifications comprise a K409R modification to one CH3 domain paired with F405L modification in the second CH3 domain. Additional modifications can also, or alternatively, be at positions 366, 368, 370, 399, 405, 407, and 409. In some cases, heterodimerization of polypeptides comprising such modifications is achieved under reducing conditions, e.g., 10-100 mM 2-MEA (e.g., 25, 50, or 100 mM 2-MEA) for 1-10, e.g., 1.5-5, e.g., 5, hours at 25-37 C, e.g., 25 C or 37 C.

[0392] The amino acid replacements described herein can be introduced into the CH3 domains using techniques which are well known (see, e.g., McPherson, ed., 1991, Directed Mutagenesis: a Practical Approach; Adelman et al., 1983, DNA, 2:183).

[0393] The IgG heterodimerization strategy is further described in, for example, WO2008/119353, WO2011/131746, and WO2013/060867.

[0394] In any of the embodiments described in this Section, the CH3 domains can be additionally modified to introduce a pair of cysteine residues as described in Section 7.4.1.3.

[0395] 7.4.1.5.3. pl (Isoelectric Point) Variants

[0396] In general, as will be appreciated by a skilled artisan, there are two general categories of pl variants: those that increase the pl of the protein (basic changes) and those that decrease the pl of the protein (acidic changes). As described herein, all combinations of these variants can be done: one Fc region can be wild type, or a variant that does not display a significantly different pl from wild-type, and the other can be either more basic or more acidic. Alternatively, each Fc region is changed, one to more basic and one to more acidic.

[0397] Exemplary combinations of pl variants are shown in Table 6. As outlined herein and shown in Table 6, these changes are shown relative to IgG1, but all isotypes can be altered this way, as well as isotype hybrids. In the case where the heavy chain constant domain is from IgG2-4, R133E and R133Q can also be used.

TABLE 6
Exemplary pI Variant Combinations

| Variant constant region | Substitutions |
|---|---|
| pI_ISO(−) | I199T N203D K274Q R355Q |
| | N384S |
| | K392N V397M Q419E DEL447 |
| pI_(−)_isosteric_A | N208D Q295E N384D Q418E |
| | N421D |
| pI_(−)_isosteric A-Fc only | Q295E N384D Q418E N421D |
| pI_(−)_isosteric_B | N208D Q295E Q418E N421D |
| pI_(−)_isosteric_B-Fc only | Q295E Q418E N421D |
| pI_ISO(+RR) | Q196K I199T P217R P228R |
| | N276K |
| pI_ISO(+) | Q196K I199T N276K |
| pI_(+)_isosteric_A | E269Q E272Q E283Q E357Q |
| pI_(+)_isosteric_B | E269Q E272Q E283Q |
| pI_(+)_isosteric_E269Q/E272Q | E269Q E272Q |
| pI_(+)_isosteric_E269Q/E283Q | E269Q E283Q |
| pI_(+)_isosteric_E272Q/E283Q | E272Q E283Q |
| pI_(+)_isosteric_E269Q | E269Q |

[0398] In one embodiment, for example in the FIG. 1B-1W, FIG. 1Y-1AH, FIG. 2B-2L, and FIG. 2N-2V formats, a combination of pl variants has one Fc region (the negative Fab side) comprising 208D/295E/384D/418E/421D variants (N208D/Q295E/N384D/Q418E/N421D when relative to human IgG1) and a second Fc region (the positive scFv side) comprising a positively charged scFv linker, e.g., L36 (described in Section 7.4.3). However, as will be appreciated by a skilled artisan, the first Fc region includes a CH1 domain, including position 208. Accordingly, in constructs that do not include a CH1 domain (for example for MBMs that do not utilize a CH1 domain as one of the domains, for example in a format depicted in FIG. 2K), a negative pl variant Fc set can include 295E/384D/418E/421D variants (Q295E/N384D/Q418E/N421D when relative to human IgG1).

[0399] In some embodiments, a first Fc region has a set of substitutions from Table 6 and a second Fc region is connected to a charged linker (e.g., selected from those described in Section 7.4.3).

[0400] In some embodiments, the CD19 binding molecule of the present disclosure comprises a first Fc region and a second Fc region. In some embodiments, the first Fc region comprises the following mutations: N208D, Q295E, N384D, Q418E, and N421D. In some embodiments, the second Fc region comprises the following mutations: N208D, Q295E, N384D, Q418E, and N421D.

[0401] 7.4.1.5.4. Isotopic Variants

[0402] In addition, many embodiments of the disclosure rely on the “importation” of pl amino acids at particular positions from one IgG isotype into another, thus reducing or eliminating the possibility of unwanted immunogenicity being introduced into the variants. A number of these are shown in FIG. 21 of US Publ. 2014/0370013. That is, IgG1 is a common isotype for therapeutic antibodies for a variety of reasons, including high effector function. However, the heavy constant region of IgG1 has a higher pl than that of IgG2 (8.10 versus 7.31). By introducing IgG2 residues at particular positions into the IgG1 backbone, the pl of the resulting Fc region is lowered (or increased) and additionally exhibits longer serum half-life. For example, IgG1 has a glycine (pl 5.97) at position 137, and IgG2 has a glutamic acid (pl 3.22); importing the glutamic acid will affect the pl of the resulting protein. As is described below, a number of amino acid substitutions are generally required to significantly affect the pl of the variant antibody. However, it should be noted as discussed below that even changes in IgG2 molecules allow for increased serum half-life.

[0403] In other embodiments, non-isotypic amino acid changes are made, either to reduce the overall charge state of the resulting protein (e.g., by changing a higher pl amino acid to a lower pl amino acid), or to allow accommodations in structure for stability, as is further described below.

[0404] In addition, by pl engineering both the heavy and light constant domains of a CD19 binding molecule comprising two half antibodies, significant changes in each half antibody can be seen. Having the pls of the two half antibodies differ by at least 0.5 can allow separation by ion exchange chromatography or isoelectric focusing, or other methods sensitive to isoelectric point.

[0405] 7.4.1.5.5. Calculating pl

[0406] The pl of a half antibody comprising an Fc region and an ABM or ABM chain can depend on the pl of the variant heavy chain constant domain and the pl of the total half antibody, including the variant heavy chain constant domain and ABM or ABM chain. Thus, in some embodiments, the change in pl is calculated on the basis of the variant heavy chain constant domain, using the chart in the FIG. 19 of US Pub. 2014/0370013. As discussed herein, which half antibody to engineer is generally decided by the inherent pl of the half antibodies. Alternatively, the pl of each half antibody can be compared.

[0407] 7.4.1.5.6. pl Variants that Also Confer Better FcRn In Vivo Binding

[0408] In the case where a pl variant decreases the pl of an Fc region, it can have the added benefit of improving serum retention in vivo.

[0409] pl variant Fc regions are believed to provide longer half-lives to antigen binding molecules in vivo, because binding to FcRn at pH 6 in an endosome sequesters the Fc (Ghetie and Ward, 1997, Immunol Today. 18(12): 592-598). The endosomal compartment then recycles the Fc to the cell surface. Once the compartment opens to the extracellular space, the higher pH ˜7.4, induces the release of Fc back into the blood. In mice, Dall' Acqua et al. showed that Fc mutants with increased FcRn binding at pH 6 and pH 7.4 actually had reduced serum concentrations and the same half life as wild-type Fc (Dall' Acqua et al., 2002, J. Immunol. 169:5171-5180). The increased affinity of Fc for FcRn at pH 7.4 is thought to forbid the release of the Fc back into the blood. Therefore, the Fc mutations that will increase Fc's half-life in vivo will ideally increase FcRn binding at the lower pH while still allowing release of Fc at higher pH. The amino acid histidine changes its charge state in the pH range of 6.0 to 7.4. Therefore, it is not surprising to find His residues at important positions in the Fc/FcRn complex.

[0410] It has been suggested that antibodies with variable regions that have lower isoelectric points can also have longer serum half-lives (Igawa et al., 2010, PEDS. 23(5): 385-392). However, the mechanism of this is still poorly understood. Moreover, variable regions differ from antibody to antibody. Constant region variants with reduced pl and extended half-life would provide a more modular approach to improving the pharmacokinetic properties of CD19 binding molecules, as described herein.

[0411] 7.4.1.5.7. Polar Bridge

[0412] Heterodimerization of polypeptide chains of CD19 binding molecules, e.g., MBMs, comprising an Fc domain can be increased by introducing modifications based on the “polar-bridging” rationale, which is to make residues at the binding interface of the two polypeptide chains to interact with residues of similar (or complimentary) physical property in the heterodimer configuration, while with residues of different physical property in the homodimer configuration. In particular, these modifications are designed so that, in the heterodimer formation, polar residues interact with polar residues, while hydrophobic residues interact with hydrophobic residues. In contrast, in the homodimer formation, residues are modified so that polar residues interact with hydrophobic residues. The favorable interactions in the heterodimer configuration and the unfavorable interactions in the homodimer configuration work together to make it more likely for Fc regions to form heterodimers than to form homodimers.

[0413] In an exemplary embodiment, the above modifications are generated at one or more positions of residues 364, 368, 399, 405, 409, and 411 of a CH3 domain.

[0414] In some embodiments, one or more modifications selected from the group consisting of S364L, T366V, L368Q, N399K, F405S, K409F and R411K are introduced into one of the two CH3 domains. One or more modifications selected from the group consisting of Y407F, K409Q and T411N can be introduced into the second CH3 domain.

[0415] In another embodiment, one or more modifications selected from the group consisting of S364L, T366V, L368Q, D399K, F405S, K409F and T411K are introduced into one CH3 domain, while one or more modifications selected from the group consisting of Y407F, K409Q and T411D are introduced into the second CH3 domain.

[0416] In one exemplary embodiment, the original residue of threonine at position 366 of one CH3 domain is replaced by valine, while the original residue of tyrosine at position 407 of the other CH3 domain is replaced by phenylalanine.

[0417] In another exemplary embodiment, the original residue of serine at position 364 of one CH3 domain is replaced by leucine, while the original residue of leucine at position 368 of the same CH3 domain is replaced by glutamine.

[0418] In yet another exemplary embodiment, the original residue of phenylalanine at position 405 of one CH3 domain is replaced by serine and the original residue of lysine at position 409 of this CH3 domain is replaced by phenylalanine, while the original residue of lysine at position 409 of the other CH3 domain is replaced by glutamine.

[0419] In yet another exemplary embodiment, the original residue of aspartic acid at position 399 of one CH3 domain is replaced by lysine, and the original residue of threonine at position 411 of the same CH3 domain is replaced by lysine, while the original residue of threonine at position 411 of the other CH3 domain is replaced by aspartic acid.

[0420] The amino acid replacements described herein can be introduced into the CH3 domains using techniques which are well known (see, e.g., McPherson, ed., 1991, Directed Mutagenesis: a Practical Approach; Adelman et al., 1983, DNA, 2:183). The polar bridge strategy is described in, for example, WO2006/106905, WO2009/089004 and Gunasekaran et al., 2010, JBC 285:19637-19646.

[0421] Additional polar bridge modifications are described in, for example, PCT publication no. WO02014/145806 (for example, FIG. 6 of WO2014/145806), PCT publication no. WO2014/110601, and PCT publication no. WO 2016/086186, WO 2016/086189, WO 2016/086196 and WO 2016/182751. An example of a polar bridge variant comprises a constant chain comprising a N208D, Q295E, N384D, Q418E and N421D modification.

[0422] In any of the embodiments described herein, the CH3 domains can be additionally modified to introduce a pair of cysteine residues as described in Section 7.4.1.3.

[0423] Additional strategies for enhancing heterodimerization are described in, for example, WO2016/105450, WO2016/086186, WO2016/086189, WO2016/086196, WO2016/141378, and WO2014/145806, and WO2014/110601. Any of the strategies can be employed in a CD19 binding molecule described herein.

[0424] 7.4.1.6. Combination of Heterodimerization Variants and Other Fc Variants

[0425] As will be appreciated by a skilled artisan, all of the recited heterodimerization variants (including skew and/or pl variants) can be optionally and independently combined in any way, as long as the Fc regions of an Fc domain retain their ability to dimerize. In addition, all of these variants can be combined into any of the heterodimerization formats.

[0426] In the case of pl variants, while embodiments finding particular use are shown in the Table 6, other combinations can be generated, following the basic rule of altering the pl difference between two Fc regions in an Fc heterodimer to facilitate purification.

[0427] In addition, any of the heterodimerization variants, skew and pl, are also independently and optionally combined with Fc ablation variants, Fc variants, FcRn variants, as generally outlined herein.

[0428] In some embodiments, a particular combination of skew and pl variants that finds use in the present disclosure is T366S/L368A/Y407V: T366W (optionally including a bridging disulfide, T366S/L368A/Y407V/Y349C: T366W/S354C) with one Fc region comprising Q295E/N384D/Q418E/N481D and the other a positively charged scFv linker (when the format includes an scFv domain). As will be appreciated by a skilled artisan, the “knobs in holes” variants do not change pl, and thus can be used on either one of the Fc regions in an Fc heterodimer.

[0429] In some embodiments, first and second Fc regions that find use the present disclosure include the amino acid substitutions S364K/E357Q: L368D/K370S, where the first and/or second Fc region includes the ablation variant substitutions 233P/L234V/L235A/G236del/S267K, and the first and/or second Fc region comprises the pl variant substitutions N208D/Q295E/N384D/Q418E/N421D (pl_(−)_isosteric_A).

[0430] 7.4.2. Hinge Regions

[0431] The CD19 binding molecules can also comprise hinge regions, e.g., connecting an antigen-binding domain to an Fc region. The hinge region can be a native or a modified hinge region. Hinge regions are typically found at the N-termini of Fc regions.

[0432] A native hinge region is the hinge region that would normally be found between Fab and Fc domains in a naturally occurring antibody. A modified hinge region is any hinge that differs in length and/or composition from the native hinge region. Such hinges can include hinge regions from other species, such as human, mouse, rat, rabbit, shark, pig, hamster, camel, llama or goat hinge regions. Other modified hinge regions can comprise a complete hinge region derived from an antibody of a different class or subclass from that of the heavy chain Fc region. Alternatively, the modified hinge region can comprise part of a natural hinge or a repeating unit in which each unit in the repeat is derived from a natural hinge region. In a further alternative, the natural hinge region can be altered by converting one or more cysteine or other residues into neutral residues, such as serine or alanine, or by converting suitably placed residues into cysteine residues. By such means the number of cysteine residues in the hinge region can be increased or decreased. This approach is described further in U.S. Pat. No. 5,677,425 by Bodmer et al. Altering the number of cysteine residues in a hinge region can, for example, facilitate assembly of light and heavy chains, or increase or decrease the stability of a CD19 binding molecule. Other modified hinge regions can be entirely synthetic and can be designed to possess desired properties such as length, cysteine composition and flexibility.

[0433] A number of modified hinge regions have been described for example, in U.S. Pat. No. 5,677,425, WO9915549, WO2005003170, WO2005003169, WO2005003170, WO9825971 and WO2005003171.

[0434] Examples of suitable hinge sequences are shown in Table 7

TABLE 7
Hinge Sequences

| | | | SEQ |
|---|---|---|---|
| Hinge | Hinge | | ID |
| Name | Description | Hinge Sequence | NO: |
| H1 | Human IgA1 | VPSTPPTPSPSTPPTPSPS | 57 |
| H2 | Human IgA2 | VPPPPP | 58 |
| H3 | Human IgD | ESPKAQASSVPTAQPQAEGS | 59 |
| | | LAKATTAPATTRNTGRGGEE | |
| | | KKKEKEKEEQEERETKTP | |
| H4 | Human IgG1 | EPKSCDKTHTCPPCP | 60 |
| H5 | Human IgG2 | ERKCCVECPPCP | 61 |
| H6 | Human IgG3 | ELKTPLGDTTHTCPRCPEPK | 62 |
| | | SCDTPPPCPRCPEPKSCDTP | |
| | | PPCPRCPEPKSCDTPPPCPR | |
| | | CP | |
| H7 | Human IgG4 | ESKYGPPCPSCP | 63 |
| H8 | Human IgG4(P) | ESKYGPPCPPCP | 64 |
| H9 | Engineered v1 | CPPC | 55 |
| H10 | Engineered v2 | CPSC | 65 |
| H11 | Engineered v3 | CPRC | 66 |
| H12 | Engineered v4 | SPPC | 67 |
| H13 | Engineered v5 | CPPS | 68 |
| H14 | Engineered v6 | SPPS | 56 |
| H15 | Engineered v7 | DKTHTCAA | 69 |
| H16 | Engineered v8 | DKTHTCPPCPA | 70 |
| H17 | Engineered v9 | DKTHTCPPCPATCPPCPA | 71 |
| H18 | Engineered v10 | DKTHTCPPCPATCPPCPATC | 72 |
| | | PPCPA | |
| H19 | Engineered v11 | DKTHTCPPCPAGKPTLYNSL | 73 |
| | | VMSDTAGTCY | |
| H20 | Engineered v12 | DKTHTCPPCPAGKPTHVNVS | 74 |
| | | VVMAEVDGTCY | |
| H21 | Engineered v13 | DKTHTCCVECPPCPA | 75 |
| H22 | Engineered v14 | DKTHTCPRCPEPKSCDTPPP | 76 |
| | | CPRCPA | |
| H23 | Engineered v15 | DKTHTCPSCPA | 77 |

[0435] In one embodiment, the heavy chain Fc region possesses an intact hinge region at its N-terminus.

[0436] In one embodiment, the heavy chain Fc region and hinge region are derived from IgG4 and the hinge region comprises the modified sequence CPPC (SEQ ID NO:55). The core hinge region of human IgG4 contains the sequence CPSC (SEQ ID NO:65) compared to IgG1 which contains the sequence CPPC (SEQ ID NO:55). The serine residue present in the IgG4 sequence leads to increased flexibility in this region, and therefore a proportion of molecules form disulfide bonds within the same protein chain (an intrachain disulfide) rather than bridging to the other heavy chain in the IgG molecule to form the interchain disulfide. (Angel et al., 1993, Mol Immunol 30(1):105-108). Changing the serine residue to a proline to give the same core sequence as IgG1 allows complete formation of inter-chain disulfides in the IgG4 hinge region, thus reducing heterogeneity in the purified product. This altered isotype is termed IgG4P.

[0437] 7.4.3. ABM Linkers

[0438] In certain aspects, the present disclosure provides CD19 binding molecules where two or more components of an ABM (e.g., a VH and a VL of an scFv), two or more ABMs, or an ABM and a non-ABM domain (e.g., a dimerization domain such as an Fc region) are connected to one another by a peptide linker. Such linkers are referred to herein an “ABM linkers.”,

[0439] A peptide linker can range from 2 amino acids to 60 or more amino acids, and in certain aspects a peptide linker ranges from 3 amino acids to 50 amino acids, from 4 to 30 amino acids, from 5 to 25 amino acids, from 10 to 25 amino acids or from 12 to 20 amino acids. In particular embodiments, a peptide linker is 2 amino acids, 3 amino acids, 4 amino acid, 5 amino acids, 6 amino acids, 7 amino acids, 8 amino acids, 9 amino acids, 10 amino acids, 11 amino acids, 12 amino acids, 13 amino acids, 14 amino acid, 15 amino acids, 16 amino acids, 17 amino acids, 18 amino acids, 19 amino acids, 20 amino acids, 21 amino acids, 22 amino acids, 23 amino acids, 24 amino acid, 25 amino acids, 26 amino acids, 27 amino acids, 28 amino acids, 29 amino acids, 30 amino acids, 31 amino acids, 32 amino acids, 33 amino acids, 34 amino acid, 35 amino acids, 36 amino acids, 37 amino acids, 38 amino acids, 39 amino acids, 40 amino acids, 41 amino acids, 42 amino acids, 43 amino acids, 44 amino acid, 45 amino acids, 46 amino acids, 47 amino acids, 48 amino acids, 49 amino acids, or 50 amino acids in length.

[0440] Charged and/or flexible linkers can be used.

[0441] Examples of flexible ABM linkers that can be used in the CD19 binding molecules include those disclosed by Chen et al., 2013, Adv Drug Deliv Rev. 65(10):1357-1369 and Klein et al., 2014, Protein Engineering, Design & Selection 27(10):325-330. A particularly useful flexible linker is (GGGGS)n (also referred to as (G4S)n) (SEQ ID NO:78). In some embodiments, n is any number between 1 and 10, i.e., 1, 2, 3, 4, 5, 6, 7, 8, 9, and 10, or any range bounded by any two of the foregoing numbers, e.g., 1 to 5, 2 to 5, 3 to 6, 2 to 4, 1 to 4, and so on and so forth.

[0442] Other examples of suitable ABM linkers for use in the CD19 binding molecules of the present disclosure are shown in Table 8 below:

TABLE 8
ABM Linker Sequences

| | | SEQ |
|---|---|---|
| Linker | | ID |
| Name | Linker Sequence | NO: |
| L1 | ADAAP | 79 |
| L2 | ADAAPTVSIFP | 80 |
| L3 | ADAAPTVSIFPP | 81 |
| L4 | AKTTAP | 82 |
| L5 | AKTTAPSVYPLAP | 83 |
| L6 | AKTTPKLEEGEFSEARV | 84 |
| L7 | AKTTPKLGG | 85 |
| L8 | AKTTPP | 86 |
| L9 | AKTTPPSVTPLAP | 87 |
| L10 | ASTKGP | 88 |
| L11 | ASTKGPSVFPLAP | 89 |
| L12 | ASTKGPSVFPLAPASTKGPSVFPLAP | 90 |
| L13 | EGKSSGSGSESKST | 91 |
| L14 | GEGESGEGESGEGES | 92 |
| L15 | GEGESGEGESGEGESGEGES | 93 |
| L16 | GEGGSGEGGSGEGGS | 94 |
| L17 | GENKVEYAPALMALS | 95 |
| L18 | GGEGSGGEGSGGEGS | 96 |
| L19 | GGGESGGEGSGEGGS | 97 |
| L20 | GGGESGGGESGGGES | 98 |
| L21 | (GGGGS)ₙ (also referred to as | 99 |
| | (G4S)ₙ), where n can be 1-10. | |
| L22 | GGGGSGGGGS | 100 |
| L23 | GGGGSGGGGSGGGGS | 53 |
| L24 | GGGGSGGGGSGGGGSGGGGS | 101 |
| L25 | GGGKSGGGKSGGGKS | 102 |
| L26 | GGGKSGGKGSGKGGS | 103 |
| L27 | GGKGSGGKGSGGKGS | 104 |
| L28 | GGSGG | 105 |
| L29 | GGSGGGGSG | 106 |
| L30 | GGSGGGGSGGGGS | 107 |
| L31 | GHEAAAVMQVQYPAS | 108 |
| L32 | GKGGSGKGGSGKGGS | 109 |
| L33 | GKGKSGKGKSGKGKS | 110 |
| L34 | GKGKSGKGKSGKGKSGKGKS | 111 |
| L35 | GKPGSGKPGSGKPGS | 112 |
| L36 | GKPGSGKPGSGKPGSGKPGS | 113 |
| L37 | GPAKELTPLKEAKVS | 114 |
| L38 | GSAGSAAGSGEF | 115 |
| L39 | IRPRAIGGSKPRVA | 116 |
| L40 | KESGSVSSEQLAQFRSLD | 117 |
| L41 | KTTPKLEEGEFSEAR | 118 |
| L42 | QPKAAP | 119 |
| L43 | QPKAAPSVTLFPP | 120 |
| L44 | RADAAAA(G4S)₄ | 121 |
| L45 | RADAAAAGGPGS | 122 |
| L46 | RADAAP | 123 |
| L47 | RADAAPTVS | 124 |
| L48 | SAKTTP | 125 |
| L49 | SAKTTPKLEEGEFSEARV | 126 |
| L50 | SAKTTPKLGG | 127 |
| L51 | STAGDTHLGGEDFD | 128 |
| L52 | TVAAP | 129 |
| L53 | TVAAPSVFIFPP | 130 |
| L54 | TVAAPSVFIFPPTVAAPSVFIFPP | 131 |
| L55 | GSTSGSGKPGSGEGSTKG | 132 |
| L56 | PRGASKSGSASQTGSAPGS | 133 |
| L57 | GTAAAGAGAAGGAAAGAAG | 134 |
| L58 | GTSGSSGSGSGGSGSGGGG | 135 |

[0443] In various aspects, the disclosure provides a CD19 binding molecule which comprises one or more ABM linkers. Each of the ABM linkers can be range from 2 amino acids to 60 amino acids in length, e.g., 4 to 30 amino acids, from 5 to 25 amino acids, from 10 to 25 amino acids or from 12 to 20 amino acids in length, optionally selected from Table 8 above. In particular embodiments, the CD19 binding molecule comprises two, three, four, five or six ABM linkers. The ABM linkers can be on one, two, three, four or even more polypeptide chains of the CD19 binding molecule.

### 7.5. Bispecific Binding Molecule Configurations

[0444] Exemplary BBM configurations are shown in FIG. 1. FIG. 1A shows the components of the BBM configurations shown in FIGS. 1B-1AH. The scFv, Fab, scFab, non-immunoglobulin based ABM, and Fc domains each can have the characteristics described for these components in Sections 7.3 and 7.4. The components of the BBM configurations shown in FIG. 1 can be associated with each other by any of the means described in Sections 7.3 and 7.4 (e.g., by direct bonds, ABM linkers, disulfide bonds, Fc domains with modified with knob in hole interactions, etc.). The orientations and associations of the various components shown in FIG. 1 are merely exemplary; as will be appreciated by a skilled artisan, other orientations and associations can be suitable (e.g., as described in Sections 7.3 and 7.4).

[0445] BBMs are not limited to the configurations shown in FIG. 1. Other configurations that can be used are known to those skilled in the art. See, e.g., WO 2014/145806; WO 2017/124002; Liu et al., 2017, Front Immunol. 8:38; Brinkmann & Kontermann, 2017, mAbs 9:2, 182-212; US 2016/0355600; Klein et al., 2016, MAbs 8(6):1010-20; and US 2017/0145116.

[0446] 7.5.1. Exemplary Bivalent BBMs

[0447] The BBMs can be bivalent, i.e., they have two antigen-binding domains, one of which binds CD19 (ABM1) and one of which binds a second target antigen (ABM2), e.g., a component of a TCR complex.

[0448] Exemplary bivalent BBM configurations are shown in FIGS. 1B-1F.

[0449] As depicted in FIGS. 1B-1D, a BBM can comprise two half antibodies, one comprising one ABM and the other comprising one ABM, the two halves paired through an Fc domain.

[0450] In the embodiment of FIG. 1B, the first (or left) half antibody comprises a Fab and an Fc region, and the second (or right) half antibody comprises a Fab and an Fc region. The first and second half antibodies are associated through the Fc regions forming an Fc domain.

[0451] In the embodiment of FIG. 1C, the first (or left) half antibody comprises a Fab and an Fc region, and the second (or right) half antibody comprises a scFv and an Fc region. The first and second half antibodies are associated through the Fc regions forming an Fc domain.

[0452] In the embodiment of FIG. 1D, the first (or left) half antibody comprises an scFv and an Fc region, and the second (or right) half antibody comprises an scFv and an Fc region. The first and second half antibodies are associated through the Fc regions forming an Fc domain.

[0453] As depicted in FIGS. 1E-1F, a bivalent BBM can comprise two ABMs attached to one Fc region of an Fc domain.

[0454] In the embodiment of FIG. 1E, the BBM comprises a Fab, a scFv and an Fc domain, where the scFv is located between the Fab and the Fc domain.

[0455] In the embodiment of FIG. 1F, (the “one-arm scFv-mAb” configuration) BBM comprises a Fab, a scFv and an Fc domain, where the Fab is located between the scFv and the Fc domain.

[0456] In the configuration shown in FIGS. 1B-1F, each of X and Y represent either ABM1 or ABM2, provided that the BBM comprises one ABM1 and one ABM2. Accordingly, the present disclosure provides a bivalent BBM as shown in any one of FIGS. 1B through 1F, where X is an ABM1 and Y is an ABM2 (this configuration of ABMs designated as “B1” for convenience). The present disclosure also provides a bivalent BBM as shown in any one of FIGS. 1B through 1F, where X is an ABM2 and Y is an ABM1 (this configuration of ABMs designated as “B2” for convenience). 7.5.2. Exemplary Trivalent BBMs

[0457] The BBMs can be trivalent, i.e., they have three antigen-binding domains, one or two of which binds CD19 (ABM1) and one or two of which binds a second target antigen (ABM2), e.g., a component of a TCR complex.

[0458] Exemplary trivalent BBM configurations are shown in FIGS. 1G-1Z.

[0459] As depicted in FIGS. 1G-1N, 1Q-1W, 1Y-1Z a BBM can comprise two half antibodies, one comprising two ABMs and the other comprising one ABM, the two halves paired through an Fc domain.

[0460] In the embodiment of FIG. 1G, the first (or left) half antibody comprises Fab and an Fc region, and the second (or right) half antibody comprises a scFv, a Fab, and an Fc region. The first and second half antibodies are associated through the Fc regions forming an Fc domain.

[0461] In the embodiment of FIG. 1H, the first (or left) half antibody comprises a Fab and an Fc region, and the second (or right) half antibody comprises a Fab, an scFv, and an Fc region. The first and second half antibodies are associated through the Fc regions forming an Fc domain.

[0462] In the embodiment of FIG. 1I, the first (or left) half antibody comprises an scFv and an Fc region, and the second (or right) half antibody comprises two Fabs and an Fc region. The first and second half antibodies are associated through the Fc regions forming an Fc domain.

[0463] In the embodiment of FIG. 1J, the first (or left) half antibody comprises two Fav and an Fc region, and the second (or right) half antibody comprises a Fab and an Fc region. The first and second half antibodies are associated through the Fc regions forming an Fc domain.

[0464] In the embodiment of FIG. 1K, the first (or left) half antibody comprises an scFv and an Fc region, and the second (or right) half antibody comprises two scFvs and an Fc region. The first and second half antibodies are associated through the Fc regions forming an Fc domain.

[0465] In the embodiment of FIG. 1L, the first (or left) half antibody comprises an scFv and an Fc region, and the second (or right) half antibody comprises an scFv, a Fab, and an Fc region. The first and second half antibodies are associated through the Fc regions forming an Fc domain.

[0466] In the embodiment of FIG. 1M, the first (or left) half antibody comprises a scFv and an Fc region, and the second (or right) half antibody comprises a Fab, a scFv and an Fc region. The first and second half antibodies are associated through the Fc regions forming an Fc domain.

[0467] In the embodiment of FIG. 1N, the first (or left) half antibody comprises a diabody-type binding domain and an Fc region, and the second (or right) half antibody comprises a Fab and an Fc region. The first and second half antibodies are associated through the Fc regions forming an Fc domain.

[0468] In the embodiment of FIG. 1Q, the first (or left) half antibody comprises a Fab and an Fc region, and the second (or right) half antibody comprises a Fab, an Fc region, and an scFv. The first and second half antibodies are associated through the Fc regions forming an Fc domain.

[0469] In the embodiment of FIG. 1R, the first (or left) half antibody comprises a scFv and an Fc region, and the second (or right) half antibody comprises a Fab, an Fc region, and an scFv. The first and second half antibodies are associated through the Fc regions forming an Fc domain.

[0470] In the embodiment of FIG. 1S, the first (or left) half antibody comprises an scFv and an Fc region, and the second (or right) half antibody comprises an scFv, an Fc region, and a second scFv. The first and second half antibodies are associated through the Fc regions forming an Fc domain.

[0471] In the embodiment of FIG. 1T, the first (or left) half antibody comprises an scFv, an Fc region, and a Fab, and the second (or right) half antibody comprises a Fab and an Fc region. The first and second half antibodies are associated through the Fc regions forming an Fc domain.

[0472] In the embodiment of FIG. 1U, the first (or left) half antibody comprises two Fab and an Fc region, and the second (or right) half antibody comprises a non-immunoglobulin based ABM and an Fc region. The first and second half antibodies are associated through the Fc regions forming an Fc domain.

[0473] In the embodiment of FIG. 1V, the first (or left) half antibody comprises a Fab, an scFv, and an Fc region, and the second (or right) half antibody comprises a non-immunoglobulin based ABM and an Fc region. The first and second half antibodies are associated through the Fc regions forming an Fc domain.

[0474] In the embodiment of FIG. 1W, the first (or left) half antibody comprises a Fab and an Fc region, and the second (or right) half antibody comprises a scFv, a non-immunoglobulin based ABM, and an Fc region. The first and second half antibodies are associated through the Fc regions forming an Fc domain.

[0475] In the embodiment of FIG. 1Y, the first (or left) half antibody comprises an scFv and an Fc region, and the second (or right) half antibody comprises a Fab, an scFv and an Fc region. The first and second half antibodies are associated through the Fc regions forming an Fc domain.

[0476] In the embodiment of FIG. 1Z, the first (or left) half antibody comprises a Fab, an Fc region, and a scFab, and the second (or right) half antibody comprises a Fab and an Fc region. The first and second half antibodies are associated through the Fc regions forming an Fc domain.

[0477] Alternatively, as depicted in FIGS. 1O and 1P, trivalent a BBM can comprise two half antibodies, each comprising one complete ABM (a Fab in FIGS. 1O and 1P) and a portion of another ABM (one a VH, the other a VL). The two half antibodies are paired through an Fc domain, whereupon the VH and the VL associate to form a complete antigen-binding Fv domain.

[0478] The BBM can be a single chain, as shown in FIG. 1X. The BBM of FIG. 1X comprises three scFv domains connected through linkers.

[0479] In the configuration shown in FIGS. 1G-1Z, each of X, Y and A represent either an ABM1 or ABM2, provided that the BBM comprises at least ABM1 and at least one ABM2. Thus, the trivalent MBMs will include one or two ABM1s and one or two ABM2s. In some embodiments, a trivalent BBM comprises two ABM1s and one ABM2. In other embodiments, a trivalent BBM of the disclosure comprises one ABM1 and two ABM2s.

[0480] Accordingly, in the present disclosure provides a trivalent BBM as shown in any one of FIGS. 1G through 1Z, where X is an ABM1, Y is an ABM1 and A is an ABM2 (this configuration of ABMs designated as “T1” for convenience).

[0481] The disclosure further provides a trivalent BBM as shown in any one of FIGS. 1G through 1Z, where X is an ABM1, Y is an ABM2 and A is an ABM1 (this configuration of ABMs designated as “T2” for convenience).

[0482] The disclosure further provides a trivalent BBM as shown in any one of FIGS. 1G through 1Z, where X is an ABM2, Y is an ABM1 and A is an ABM1 (this configuration of ABMs designated as “T3” for convenience).

[0483] The disclosure further provides a trivalent BBM as shown in any one of FIGS. 1G through 1Z, where X is an ABM1, Y is an ABM2 and A is an ABM2 (this configuration of ABMs designated as “T4” for convenience).

[0484] The disclosure further provides a trivalent BBM as shown in any one of FIGS. 1G through 1Z, where X is an ABM2, Y is an ABM1 and A is an ABM2 (this configuration of ABMs designated as “T5” for convenience).

[0485] The disclosure further provides a trivalent BBM as shown in any one of FIGS. 1G through 1Z, where X is an ABM2, Y is an ABM2 and A is an ABM1 (this configuration of ABMs designated as “T6” for convenience).

[0486] 7.5.3. Exemplary Tetravalent BBMs

[0487] The BBMs can be tetravalent, i.e., they have four antigen-binding domains, one, two, or three of which binds CD19 (ABM1) and one, two, or three of which binds a second target antigen (ABM2), e.g., a component of a TCR complex.

[0488] Exemplary tetravalent BBM configurations are shown in FIGS. 1AA-1AH.

[0489] As depicted in FIGS. 1AA-1AH, a tetravalent BBM can comprise two half antibodies, each comprising two complete ABMs, the two halves paired through an Fc domain.

[0490] In the embodiment of FIG. 1AA, the first (or left) half antibody comprises a Fab, an Fc region, and an scFv, and the second (or right) half antibody comprises a Fab, an Fc region, and an scFv. The first and second half antibodies are associated through the Fc regions forming an Fc domain.

[0491] In the embodiment of FIG. 1AB, the first (or left) half antibody comprises a Fab, an scFv, and an Fc region, and the second (or right) half antibody comprises a Fab, an scFv, and an Fc region. The first and second half antibodies are associated through the Fc regions forming an Fc domain.

[0492] In the embodiment of FIG. 1AC, the first (or left) half antibody comprises an scFv, a Fab, and an Fc region, and the second (or right) half antibody comprises an scFv, a Fab, and an Fc region. The first and second half antibodies are associated through the Fc regions forming an Fc domain.

[0493] In the embodiment of FIG. 1AD, the first (or left) half antibody comprises a Fab, an Fc region, and a second Fab, and the second (or right) half antibody comprises a Fab, an Fc region, and a second Fab. The first and second half antibodies are associated through the Fc regions forming an Fc domain.

[0494] In the embodiment of FIG. 1AE, the first (or left) half antibody comprises an scFv, a second scFv, and an Fc region, and the second (or right) half antibody comprises an scFv, a second scFv, and an Fc region. The first and second half antibodies are associated through the Fc regions forming an Fc domain.

[0495] In the embodiment of FIG. 1AF, the first (or left) half antibody comprises a Fab, an scFv, and an Fc region, and the second (or right) half antibody comprises a Fab, an scFv, and an Fc region. The first and second half antibodies are associated through the Fc regions forming an Fc domain.

[0496] In the embodiment of FIG. 1AG, the first (or left) half antibody comprises a Fab, an Fc region, and an scFv, and the second (or right) half antibody comprises a scFv, an Fc region, and a Fab. The first and second half antibodies are associated through the Fc regions forming an Fc domain.

[0497] In the embodiment of FIG. 1AH, the first (or left) half antibody comprises a scFv, an Fc region, and an Fab, and the second (or right) half antibody comprises a scFv, an Fc region, and a Fab. The first and second half antibodies are associated through the Fc regions forming an Fc domain.

[0498] In the configuration shown in FIGS. 1AA-1AH, each of X, Y, A, and B represent ABM1 or ABM2, although not necessarily in that order, and provided that the BBM comprises at least one ABM1 and at least one ABM2. Thus, the tetravalent ABMs will include one, two, or three ABM1s and one, two, or ABM2s. In some embodiments, a tetravalent BBM comprises three ABM1s and one ABM2. In other embodiments, a tetravalent BBM comprises two ABM1s two ABM2s. In yet other embodiments, a tetravalent BBM comprises one ABM1 and three ABM2s.

[0499] Accordingly, in the present disclosure provides a tetravalent BBM as shown in any one of FIGS. 1AA-1AH, where X is an ABM1 and each of Y, A, and B are ABM2s (this configuration of ABMs designated as “Tv 1” for convenience).

[0500] The disclosure further provides a tetravalent BBM as shown in any one of FIGS. 1AA-1AH, where Y is an ABM1 and each of X, A, and B are ABM2s (this configuration of ABMs designated as “Tv 2” for convenience).

[0501] The disclosure further provides a tetravalent BBM as shown in any one of FIGS. 1AA-1AH, where A is an ABM1 and each of X, Y, and B are ABM2s (this configuration of ABMs designated as “Tv 3” for convenience).

[0502] The disclosure further provides a tetravalent BBM as shown in any one of FIGS. 1AA-1AH, where B is an ABM1 and each of X, Y, and A are ABM2s (this configuration of ABMs designated as “Tv 4” for convenience).

[0503] The disclosure further provides a tetravalent BBM as shown in any one of FIGS. 1AA-1AH, where X and Y are both ABM1s and both of A and B are ABM2s (this configuration of ABMs designated as “Tv 5” for convenience).

[0504] The disclosure further provides a tetravalent BBM as shown in any one of FIGS. 1AA-1AH, where X and A are both ABM1s and both of Y and B are ABM2s (this configuration of ABMs designated as “Tv 6” for convenience).

[0505] The disclosure further provides a tetravalent BBM as shown in any one of FIGS. 1AA-1AH, where X and B are both ABM1s and both of Y and A are ABM2s (this configuration of ABMs designated as “Tv 7” for convenience).

[0506] The disclosure further provides a tetravalent BBM as shown in any one of FIGS. 1AA-1AH, where Y and A are both ABM1s and both of X and B are ABM2s (this configuration of ABMs designated as “Tv 8” for convenience).

[0507] The disclosure further provides a tetravalent BBM as shown in any one of FIGS. 1AA-1AH, where Y and B are both ABM1s and both of X and A are ABM2s (this configuration of ABMs designated as “Tv 9” for convenience).

[0508] The disclosure further provides a tetravalent BBM as shown in any one of FIGS. 1AA-1AH, where A and B are both ABM1s and both of X and Y are ABM2s (this configuration of ABMs designated as “Tv 10” for convenience).

[0509] The disclosure further provides a tetravalent BBM as shown in any one of FIGS. 1AA-1AH, where each of X, Y, and A is an ABM1 and B is an ABM2 (this configuration of ABMs designated as “Tv 11” for convenience).

[0510] The disclosure further provides a tetravalent BBM as shown in any one of FIGS. 1AA-1AH, where each of X, Y, and B is an ABM1 and A is an ABM2 (this configuration of ABMs designated as “Tv 12” for convenience).

[0511] The disclosure further provides a tetravalent BBM as shown in any one of FIGS. 1AA-1AH, where each of X, A, and B is an ABM1 and Y is an ABM2 (this configuration of ABMs designated as “Tv 13” for convenience).

[0512] The disclosure further provides a tetravalent BBM as shown in any one of FIGS. 1AA-1AH, where each of Y, A, and B is an ABM1 and X is an ABM2 (this configuration of ABMs designated as “Tv 14” for convenience).

### 7.6. Trispecific Binding Molecule Configurations

[0513] Exemplary TBM configurations are shown in FIG. 2. FIG. 2A shows the components of the TBM configurations shown in FIGS. 2B-1V. The scFv, Fab, non-immunoglobulin based ABM, and Fc each can have the characteristics described for these components in Sections 7.3 and 7.4. The components of the TBM configurations shown in FIG. 2 can be associated with each other by any of the means described in Sections 7.3 and 7.4 (e.g., by direct bonds, ABM linkers, disulfide bonds, Fc domains with modified with knob in hole interactions, etc.). The orientations and associations of the various components shown in FIG. 2 are merely exemplary; as will be appreciated by a skilled artisan, other orientations and associations can be suitable (e.g., as described in Sections 7.3 and 7.4).

[0514] TBMs are not limited to the configurations shown in FIG. 2. Other configurations that can be used are known to those skilled in the art. See, e.g., WO 2014/145806; WO 2017/124002; Liu et al., 2017, Front Immunol. 8:38; Brinkmann & Kontermann, 2017, mAbs 9:2, 182-212; US 2016/0355600; Klein et al., 2016, MAbs 8(6):1010-20; and US 2017/0145116.

[0515] 7.6.1. Exemplary Trivalent TBMs

[0516] The TBMs of the disclosure can be trivalent, i.e., they have three antigen-binding domains, one of which binds CD19, one of which binds a component of a TCR complex, and one of which binds either CD2 or a TAA.

[0517] Exemplary trivalent TBM configurations are shown in FIGS. 2B through 2P.

[0518] As depicted in FIGS. 2B-2K and 2N-2P, a TBM can comprise two half antibodies, one comprising two ABMs and the other comprising one ABM, the two halves paired through an Fc domain.

[0519] In the embodiment of FIG. 2B, the first (or left) half antibody comprises an scFv and an Fc region, and the second (or right) half antibody comprises a Fab, an scFv and an Fc region. The first and second half antibodies are associated through the Fc regions forming an Fc domain.

[0520] In the embodiment of FIG. 2C, the first (or left) half antibody comprises two Fab and an Fc region, and the second (or right) half antibody comprises a Fab and an Fc region. The first and second half antibodies are associated through the Fc regions forming an Fc domain.

[0521] In the embodiment of FIG. 2D, the first (or left) half antibody comprises a Fab, an scFv and an Fc region, and the second (or right) half antibody comprises a Fab and an Fc region. The first and second half antibodies are associated through the Fc regions forming an Fc domain.

[0522] In the embodiment of FIG. 2E, the first (or left) half antibody comprises an scFv and an Fc region, and the second (or right) half antibody comprises two Fab and an Fc region. The first and second half antibodies are associated through the Fc regions forming an Fc domain.

[0523] In the embodiment of FIG. 2F, the first (or left) half antibody comprises an scFv, an Fc region, and a Fab, and the second (or right) half antibody comprises a Fab and an Fc region. The first and second half antibodies are associated through the Fc regions forming an Fc domain.

[0524] In the embodiment of FIG. 2G, the first (or left) half antibody comprises an scFv and an Fc region, and the second (or right) half antibody comprises a Fab an Fc region, and an scFV. The first and second half antibodies are associated through the Fc regions forming an Fc domain.

[0525] In the embodiment of FIG. 2H, the first (or left) half antibody comprises two Fab and an Fc region, and the second (or right) half antibody comprises a non-immunoglobulin based ABM and an Fc region. The first and second half antibodies are associated through the Fc regions forming an Fc domain.

[0526] In the embodiment of FIG. 2I, the first (or left) half antibody comprises a Fab, an scFv, and an Fc region, and the second (or right) half antibody comprises a non-immunoglobulin based ABM and an Fc region. The first and second half antibodies are associated through the Fc regions forming an Fc domain.

[0527] In the embodiment of FIG. 2J, the first (or left) half antibody comprises a Fab and an Fc region, and the second (or right) half antibody comprises an scFv, a non-immunoglobulin based ABM and an Fc region. The first and second half antibodies are associated through the Fc regions forming an Fc domain.

[0528] In the embodiment of FIG. 2K, the first (or left) half antibody comprises an scFv and an Fc region, and the second (or right) half antibody comprises an scFv, an Fc region, and a second scFv. The first and second half antibodies are associated through the Fc regions forming an Fc domain.

[0529] In the embodiment of FIG. 2N, the first (or left) half antibody comprises a Fab, an Fc region, and an scFv, and the second (or right) half antibody comprises a Fab, and an Fc region. The first and second half antibodies are associated through the Fc regions forming an Fc domain.

[0530] In the embodiment of FIG. 2O, the first (or left) half antibody comprises a Fab, an Fc region, and a scFab, and the second (or right) half antibody comprises a Fab and an Fc region. The first and second half antibodies are associated through the Fc regions forming an Fc domain.

[0531] In the embodiment of FIG. 2P, the first (or left) half antibody comprises a Fab, a non-immunoglobulin based ABM, and an Fc region, and the second (or right) half antibody comprises a scFv and an Fc region. The first and second half antibodies are associated through the Fc regions forming an Fc domain.

[0532] Alternatively, as depicted in FIG. 2L, trivalent a TBM can comprise two half antibodies, each comprising one complete ABM and a portion of another ABM (one a VH, the other a VL). The two half antibodies are paired through an Fc domain, whereupon the VH and the VL associate to form a complete antigen-binding Fv domain.

[0533] The TBM can be a single chain, as shown in FIG. 2M. The TBM of FIG. 2M comprises three scFv domains connected through linkers.

[0534] In each of the configurations shown in FIGS. 2B-2P, each of the domains designated X, Y, and Z represents an ABM1, ABM2, or ABM3, although not necessarily in that order. In other words, X can be ABM1, ABM2, or ABM3, Y can be ABM1, ABM2, or ABM3, and Z can be ABM1, ABM2, or ABM3, provided that the TBM comprises one ABM1, one ABM2, and one ABM3.

[0535] Accordingly, in the present disclosure provides a trivalent TBM as shown in any one of FIGS. 2B through 2P, where X is an ABM1, Y is an ABM3 and Z is an ABM2 (this configuration of ABMs designated as “T1” for convenience).

[0536] The present disclosure also provides a trivalent TBM as shown in any one of FIGS. 2B through 2P, where X is an ABM1, Y is an ABM2, and Z is an ABM3 (this configuration of ABMs designated as “T2” for convenience).

[0537] The present disclosure further provides a trivalent TBM as shown in any one of FIGS. 2B through 2P, where X is an ABM3, Y is an ABM1, and Z is an ABM2 (this configuration of ABMs designated as “T3” for convenience).

[0538] The present disclosure yet further provides a trivalent TBM as shown in any one of FIGS. 2B through 2P, where X is an ABM3, Y is an ABM2, and Z is an ABM1 (this configuration of ABMs designated as “T4” for convenience).

[0539] The present disclosure yet further provides a trivalent TBM as shown in any one of FIGS. 2B through 2P, where X is an ABM2, Y is an ABM1, and Z is an ABM3 (this configuration of ABMs designated as “T5” for convenience).

[0540] The present disclosure yet further provides a trivalent TBM as shown in any one of FIGS. 2B through 2P, where X is an ABM2, Y is an ABM3, and Z is an ABM1 (this configuration of ABMs designated as “T6” for convenience).

[0541] 7.6.2. Exemplary Tetravalent TBMs

[0542] The TBMs of the disclosure can be tetravalent, i.e., they have four antigen-binding domains, one or two of which binds CD19, one or two of which binds a component of a TCR complex, and one or two of which binds CD2 or a TAA.

[0543] Exemplary tetravalent TBM configurations are shown in FIGS. 2Q-2S.

[0544] As depicted in FIGS. 2Q-2S, a tetravalent TBM can comprise two half antibodies, each comprising two complete ABMs, the two halves paired through an Fc domain.

[0545] In the embodiment of FIG. 2Q, the first (or left) half antibody comprises a Fab, an Fc region, and a second Fab, and the second (or right) half antibody comprises a Fab, an Fc region, and a second Fab. The first and second half antibodies are associated through the Fc regions forming an Fc domain.

[0546] In the embodiment of FIG. 2R, the first (or left) half antibody comprises a Fab, an Fc region, and an scFv, and the second (or right) half antibody comprises a Fab, an Fc region, and an scFv. The first and second half antibodies are associated through the Fc regions forming an Fc domain.

[0547] In the embodiment of FIG. 2S, the first (or left) half antibody comprises a Fab, an Fc region, and an scFv, and the second (or right) half antibody comprises an scFv, an Fc region, and a Fab. The first and second half antibodies are associated through the Fc regions forming an Fc domain.

[0548] In the configuration shown in FIGS. 2Q-2S, each of X, Y, Z, and A represent an ABM1, an ABM2, or an ABM3, although not necessarily in that order, and provided that the TBM comprises at least one ABM1, at least one ABM2, and at least one ABM3. Thus, the tetravalent ABMs will include two ABMs against one of CD19, a component of a TCR complex, and CD2 or a TAA. In some cases, a tetravalent TBM has two CD19 ABMs.

[0549] 7.6.3. Exemplary Pentavalent TBMs

[0550] The TBMs of the disclosure can be pentavalent, i.e., they have five antigen-binding domains, one, two, or three of which binds CD19, one, two, or three of which binds a component of a TCR complex, and one, two, or three of which binds CD2 or a TAA.

[0551] An exemplary pentavalent TBM configuration is shown in FIG. 2T.

[0552] As depicted in FIG. 2T, a pentavalent TBM can comprise two half antibodies, one of which comprises two complete ABMs and the other of which comprises one complete ABM, the two halves paired through an Fc domain.

[0553] In the embodiment of FIG. 2T, the first (or left) half antibody comprises a Fab, an scFv, and an Fc region, and the second (or right) half antibody comprises a Fab, an Fc region, and an scFv. The first and second half antibodies are associated through the Fc regions forming an Fc domain.

[0554] In the configuration shown in FIG. 2T, each of X, Y, Z, A, and B represent an ABM1, an ABM2, or an ABM3, although not necessarily in that order, and provided that the TBM comprises at least one ABM1, one ABM2, and one ABM3. Thus, the pentavalent TBMs can include two ABMs against two of CD19, a component of a TCR complex, and CD2 or a TAA, or three ABMs against one of CD19, a component of a TCR complex, and CD2 or a TAA. In some cases, a pentavalent TBM has two or three CD19 ABMs. In some embodiments, a pentavalent TBM has three ABM1s, one ABM2 and one ABM3.

[0555] 7.6.4. Exemplary Hexavalent TBMs

[0556] The TBMs of the disclosure can be hexavalent, i.e., they have six antigen-binding domains, one, two, three, or four of which binds CD19, one, two, three, or four of which binds a component of a TCR complex, and one, two, three, or four of which binds CD2 or a TAA.

[0557] Exemplary hexavalent TBM configurations are shown in FIGS. 2U-2V.

[0558] As depicted in FIGS. 2U-2V, a pentavalent TBM can comprise two half antibodies, one of which comprises two complete ABMs and the other of which comprises one complete ABM, the two halves paired through an Fc domain.

[0559] In the embodiment of FIG. 2U, the first (or left) half antibody comprises a Fab, a second Fab, an Fc region, and an scFv, and the second (or right) half antibody comprises a Fab, a second Fab, an Fc region, and an scFv. The first and second half antibodies are associated through the Fc regions forming an Fc domain.

[0560] In the embodiment of FIG. 2V, the first (or left) half antibody comprises a first Fv, a second Fv, a third Fv, and an Fc region, and the second (or right) half antibody comprises a first Fv, a second Fv, a third Fv, and an Fc region. The first and second half antibodies are associated through the Fc regions forming an Fc domain.

[0561] In the configuration shown in FIGS. 2U-2V, each of X, Y, Z, A, B, and C represent an ABM1, an ABM2, or an ABM3, although not necessarily in that order, and provided that the TBM comprises at least one ABM1, one ABM2, and one ABM3. Thus, the hexavalent TBMs can include (i) two ABMs against each of CD19, a component of a TCR complex, and CD2 or a TAA, (ii) three ABMs against one of CD19, a component of a TCR complex, and CD2 or a TAA, or (iii) four ABMs against one of CD19, a component of a TCR complex, and CD2 or a TAA. For example, a hexavalent ABM can include three ABMs against CD19, two ABMs against CD2 or a TAA and one ABM against a component of a TCR complex. As another example, a hexavalent ABM can include three ABMs against CD19, two ABMs against a component of a TCR complex and one ABM against CD2 or a TAA. In some cases, a hexavalent TBM has two, three, our four CD19 ABMs. In some embodiments, a hexavalent TBM has three CD19 ABMs. In other embodiments, a hexavalent TBM has four CD19 ABMs.

### 7.7. TCR ABMs

[0562] The MBMs of the disclosure contain an ABM that specifically binds to CD19 and an ABM2 which is specific for a different antigen. In the BBMs, Type 1 TBMs and Type 2 TBMs of the disclosure, ABM2 can bind to a component of a TCR complex. The TCR is a disulfide-linked membrane-anchored heterodimeric protein normally consisting of the highly variable alpha (α) and beta (β) chains expressed as part of a complex with the invariant CD3 chain molecules. T cells expressing this receptor are referred to as α:β (or αβ) T cells, though a minority of T cells express an alternate receptor, formed by variable gamma (γ) and delta (6) chains, referred as γδ T cells.

[0563] In an embodiment, MBMs contain an ABM that specifically binds to CD3.

[0564] 7.7.1. CD3 ABMs

[0565] The MBMs can contain an ABM that specifically binds to CD3. The term “CD3” refers to the cluster of differentiation 3 co-receptor (or co-receptor complex, or polypeptide chain of the co-receptor complex) of the T cell receptor. The amino acid sequence of the polypeptide chains of human CD3 are provided in NCBI Accession P04234, P07766 and P09693. CD3 proteins can also include variants. CD3 proteins can also include fragments. CD3 proteins also include post-translational modifications of the CD3 amino acid sequences. Post-translational modifications include, but are not limited to, N- and O-linked glycosylation.

[0566] In some embodiments, a MBM can comprise an ABM which is an anti-CD3 antibody (e.g., as described in US 2016/0355600, WO 2014/110601, and WO 2014/145806) or an antigen-binding domain thereof. Exemplary anti-CD3 VH, VL, and scFV sequences that can be used in a MBM are provided in Table 12A.

TABLE 12A
CD3 Binders - Variable domain sequences

| | | | SEQ |
|---|---|---|---|
| Binding | | | ID |
| Domain | Chain | Sequence | NO: |
| CD3-1 | VH | QVQLQQSGAELARPGASVKMSCKASGYTFTRYTMHWVKQRPGQG | 136 |
| | | LEWIGYINPSRGYTNYNQKFKDKATLTTDKSSSTAYMQLSSLTSEDS | |
| | | AVYYCARYYDDHYCLDYWGQGTTLTVSS | |
| | VL | QIVLTQSPAIMSASPGEKVTMTCSASSSVSYMNWYQQKSGTSPKR | 137 |
| | | WIYDTSKLASGVPAHFRGSGSGTSYSLTISGMEAEDAATYYCQQW | |
| | | SSNPFTFGSGTKLEIN | |
| CD3-2 | VH | EVQLVESGGGLVQPKGSLKLSCAASGFTFNTYAMNWVRQAPGKGL | 138 |
| | | EWVARIRSKYNNYATYYADSVKDRFTISRDDSQSILYLQMNNLKTED | |
| | | TAMYYCVRHGNFGNSYVSWFAYWGQGTLVTVSA | |
| | VL | QAVVTQESALTTSPGETVTLTCRSSTGAVTTSNYANWVQEKPDHLF | 139 |
| | | TGLIGGTNKRAPGVPARFSGSLIGDKAALTITGAQTEDEAIYFCALWY | |
| | | SNLWVFGGGTKLTVL | |
| CD3-3 | VH | QVQLQQSGAELARPGASVKMSCKASGYTFTSYTMHWVKQRPGQG | 140 |
| | | LEWIGYINPSSGYTKYNQKFKDKATLTADKSSSTAYMQLSSLTSEDS | |
| | | AVYYCARWQDYDVYFDYWGQGTTLTVSS | |
| | VL | QIVLSQSPAILSASPGEKVTMTCRASSSVSYMHWYQQKPGSSPKP | 141 |
| | | WIYATSNLASGVPARFSGSGSGTSYSLTISRVEAEDAATYYCQQWS | |
| | | SNPPTFGGGTKLETK | |
| CD3-4 | VH | QVQLQQSGAELARPGASVKMSCKASGYTFTRYTMHWVKQRPGQG | 136 |
| | | LEWIGYINPSRGYTNYNQKFKDKATLTTDKSSSTAYMQLSSLTSEDS | |
| | | AVYYCARYYDDHYCLDYWGQGTTLTVSS | |
| | VL | QIVLTQSPAIMSASPGEKVTMTCRASSSVSYMNWYQQKSGTSPKR | 142 |
| | | WIYDTSKVASGVPYRFSGSGSGTSYSLTISSMEAEDAATYYCQQWS | |
| | | SNPLTFGSGTKLEIN | |
| CD3-5 | VH | QVQLVQSGGGVVQPGRSLRLSCKASGYTFTRYTMHWVRQAPGKG | 143 |
| | | LEWIGYINPSRGYTNYNQKVKDRFTISRDNSKNTAFLQMDSLRPEDT | |
| | | GVYFCARYYDDHYCLDYWGQGTPVTVSS | |
| | VL | DIQMTQSPSSLSASVGDRVTITCSASSSVSYMNWYQQTPGKAPKR | 144 |
| | | WIYDTSKLASGVPSRFSGSGSGTDYTFTISSLQPEDIATYYCQQWS | |
| | | SNPFTFGQGTKLQIT | |
| CD3-6 | VH | QVQLVESGGGVVQPGRSLRLSCAASGFKFSGYGMHWVRQAPGKG | 145 |
| | | LEWVAVIWYDGSKKYYVDSVKGRFTISRDNSKNTLYLQMNSLRAED | |
| | | TAVYYCARQMGYWHFDLWGRGTLVTVSS | |
| | VL | EIVLTQSPATLSLSPGERATLSCRASQSVSSYLAWYQQKPGQAPRL | 146 |
| | | LIYDASNRATGIPARFSGSGSGTDFTLTISSLEPEDFAVYYCQQRSN | |
| | | WPPLTFGGGTKVEIK | |
| CD3-7 | VH | EVQLVESGGGLVQPGGSLRLSCAASGFTFSTYAMNWVRQAPGKGL | 147 |
| | | EWVGRIRSKYNNYATYYADSVKDRFISRDDSKNSLYLQMNSLKTED | |
| | | TAVYYCVRHGNFGNSYVSWFAYWGQGTLVTVSS | |
| | VL | QAVVTQEPSLTVSPGGTVTLTCRSSTGAVTTSNYANWVQQKPGQA | 148 |
| | | PRGLIGGTNKRAPWTPARFSGSLLGGKAALIGAQAEDEADYYCALW | |
| | | YSNLWVFGGGTKLTVL | |
| CD3-8 | VH | DIKLQQSGAELARPGASVKMSCKTSGYTFTRYTMHWVKQRPGQGL | 149 |
| | | EWIGYINPSRGYTNYNQKFKDKATLTTDKSSSTAYMQLSSLTSEDSA | |
| | | VYYCARYYDDHYCLDYWGQGTTLTVSS | |
| | VL | DIQLTQSPAIMSASPGEKVTMTCRASSSVSYMNWYQQKSGTSPKR | 150 |
| | | WIYDTSKVASGVPYRFSGSGSGTSYSLISSMEAEDAATYYCQQWS | |
| | | SNPLTFGAGTKLELK | |
| CD3-9 | VH | EVQLVESGGGLVQPGGSLRLSCAASGFTFNTYAMNWVRQAPGKG | 151 |
| | | LEWVARIRSKYNNYATYYADSVKDRFISRDDSKNSLYLQMNSLKTE | |
| | | DTAVYYCVRHGNFGNSYVSWFAYWGQGTLVTVSS | |
| | VL | QAVVTQEPSLTVSPGGTVTLTCRSSTGAVTTSNYANWVQQKPGQA | 148 |
| | | PRGLIGGTNKRAPWTPARFSGSLLGGKAALIGAQAEDEADYYCALW | |
| | | YSNLWVFGGGTKLTVL | |
| CD3-10 | VH | EVKLLESGGGLVQPKGSLKLSCAASGFTFNTYAMNWVRQAPGKGL | 152 |
| | | EWVARIRSKYNNYATYYADSVKDRFTISRDDSQSILYLQMNNLKTED | |
| | | TAMYYCVRHGNFGNSYVSWFAYWGQGTLVTVSA | |
| | VL | QAVVTQESALTTSPGETVTLTCRSSTGAVTTSNYANWVQEKPDHLF | 139 |
| | | TGLIGGTNKRAPGVPARFSGSLIGDKAALTITGAQTEDEAIYFCALWY | |
| | | SNLWVFGGGTKLTVL | |
| CD3-11 | VH | EVQLVESGGGLVQPGGSLKLSCAASGFTFNSYAMNWVRQAPGKG | 153 |
| | | LEWVARIRSKYNNYATYYADSVKGRFTISRDDSKNTAYLQMNNLKT | |
| | | EDTAVYYCVRHGNFGNSYVSWWAYWGQGTLVTVSS | |
| | VL | QTVVTQEPSLTVSPGGTVTLTCGSSTGAVTSGNYPNWVQQKPGQA | 154 |
| | | PRGLIGGTKFLAPGTPQRFSGSLLGGKAALTLSGVQPEDEAEYYCV | |
| | | LWYSNRWVFGGGTKLTVL | |
| CD3-12 | VH | EVQLVESGGGLVQPGGSLKLSCAASGFTFNKYAMNWVRQAPGKG | 155 |
| | | LEWVARIRSKYNNYATYYADSVKDRFTISRDDSKNTAYLQMNNLKT | |
| | | EDTAVYYCVRHGNFGNSYISYWAYWGQGTLVTVSS | |
| | VL | QTVVTQEPSLTVSPGGTVTLTCGSSTGAVTSGNYPNWVQQKPGQA | 156 |
| | | PRGLIGGTKFLAPGTPARFSGSLLGGKAALTLSGVQPEDEAEYYCVL | |
| | | WYSNRWVFGGGTKLTVL | |
| | scFv | EVQLVESGGGLVQPGGSLKLSCAASGFTFNKYAMNWVRQAPGKG | 157 |
| | | LEWVARIRSKYNNYATYYADSVKDRFTISRDDSKNTAYLQMNNLKT | |
| | | EDTAVYYCVRHGNFGNSYISYWAYWGQGTLVTVSSGGGGSGGGG | |
| | | SGGGGSGGGGSQTVVTQEPSLTVSPGGTVTLTCGSSTGAVTSGNY | |
| | | PNWVQQKPGQAPRGLIGGTKFLAPGTPARFSGSLLGGKAALTLSGV | |
| | | QPEDEAEYYCVLWYSNRWVFGGGTKLTVL | |
| CD3-13 | VH | QVQLVQSGAEVKKPGASVKVSCKASGYTFTRYTMHWVRQAPGQG | 158 |
| | | LEWMGYINPSRGYTNYNQKFKDRVTMTTDTSISTAYMELSRLRSDD | |
| | | TAVYYCARYYDDHYCLDYWGQGTLVTVSS | |
| | VL | EIVLTQSPATLSLSPGERATLSCSASSSVSYMNWYQQKPGQAPRLLI | 159 |
| | | YDTSKLASGVPAHFRGSGSGTDFTLTISSLEPEDFAVYYCQQWSSN | |
| | | PFTFGQGTKVEIK | |
| CD3-14 | VH | EVQLVESGGGLVQPGGSLRLSCAASGFTFSTYAMNWVRQAPGKGL | 160 |
| | | EWVSRIRSKYNNYATYYADSVKDRFTISRDDSKNTLYLQMNSLRAE | |
| | | DTAVYYCARHGNFGNSYVSWFAYWGQGTMVTVSS | |
| | VL | QAVVTQEPSLTVSPGGTVTLTCRSSTGAVTTSNYANWVQQKPGQA | 161 |
| | | PRGLIGGTNKRAPGTPARFSGSLLGGKAALTLSGVQPEDEAEYYCA | |
| | | LWYSNLWVFGGGTKLTVL | |
| CD3-15 | VH | EVQLVESGGGLVQPGGSLRLSCAASGFTFNTYAMNWVRQAPGKG | 162 |
| | | LEWVGRIRSKYNNYATYYADSVKDRFTISRDDSKNSLYLQMNSLKT | |
| | | EDTAVYYCVRHGNFGNSYVSWFAYWGQGTLVTVSS | |
| | VL | QAVVTQEPSLTVSPGGTVTLTCRSSTGAVTTSNYANWVQEKPGQA | 163 |
| | | PRGLIGGTNKRAPWTPARFSGSLLGGKAALTITGAQAEDEADYYCA | |
| | | LWYSNLWVFGGGTKLTVL | |
| CD3-16 | VH | EVQLVESGGGLVQPGGSLRLSCAASGFTFNTYAMNWVRQAPGKG | 164 |
| | | LEWVGRIRSKYNNYATYYADSVKGRFTISRDDSKNTLYLQMNSLRA | |
| | | EDTAVYYCVRHGNFGNSYVSWFAYWGQGTLVTVSS | |
| | VL | QAVVTQEPSLTVSPGGTVTLTCGSSTGAVTTSNYANWVQQKPGQA | 165 |
| | | PRGLIGGTNKRAPGVPARFSGSLLGGKAALTLSGAQPEDEAEYYCA | |
| | | LWYSNLWVFGGGTKLTVL | |
| CD3-17 | VH | EVQLVESGGGLVQPGGSLRLSCAASGFTFSTYAMNWVRQAPGKGL | 166 |
| | | EWVGRIRSKYNNYATYYADSVKGRFTISRDDSKNTLYLQMNSLRAE | |
| | | DTAVYYCVRHGNFGDSYVSWFAYWGQGTLVTVSS | |
| | VL | QAVVTQEPSLTVSPGGTVTLTCGSSTGAVTTSNYANWVQQKPGKS | 167 |
| | | PRGLIGGTNKRAPGVPARFSGSLLGGKAALTISGAQPEDEADYYCA | |
| | | LWYSNHWVFGGGTKLTVL | |
| CD3-18 | VH | QVQLVQSGGGVVQPGRSLRLSCKASGYTFTRYTMHWVRQAPGKG | 143 |
| | | LEWIGYINPSRGYTNYNQKVKDRFTISRDNSKNTAFLQMDSLRPEDT | |
| | | GVYFCARYYDDHYCLDYWGQGTPVTVSS | |
| | VL | DIQMTQSPSSLSASVGDRVTITCSASSSVSYMNWYQQTPGKAPKR | 168 |
| | | WIYDTSKLASGVPSRFSGSGSGTDYTFTISSLQPEDIATYYCQQWS | |
| | | SNPFTFGQGT | |
| CD3-19 | VH | QVQLVQSGGGVVQPGRSLRLSCKASGYTFTRYTMHWVRQAPGKG | 169 |
| | | LEWIGYINPSRGYTNYNQKVKDRFTISRDNSKNTAFLQMDSLRPEDT | |
| | | GVYFCARYYDDHYSLDYWGQGTPVTVSS | |
| | VL | DIQMTQSPSSLSASVGDRVTITCSASSSVSYMNWYQQTPGKAPKR | 168 |
| | | WIYDTSKLASGVPSRFSGSGSGTDYTFTISSLQPEDIATYYCQQWS | |
| | | SNPFTFGQGT | |
| CD3-20 | VH | EVQLQQSGPELVKPGASMKISCKASGYSFTGYTMNWVKQSHGKNL | 170 |
| | | EWMGLINPYKGVSTYNQKFKDKATLTVDKSSSTAYMELLSLTSEDS | |
| | | AVYYCARSGYYGDSDWYFDVWGQGTTLTVFS | |
| | VL | DIQMTQTTSSLSASLGDRVTISCRASQDIRNYLNWYQQKPDGTVKLL | 171 |
| | | IYYTSRLHSGVPSKFSGSGSGTDYSLTISNLEQEDIATYFCQQGNTL | |
| | | PWTFAGGTKLEIK | |
| CD3-21 | VH | EVQLVESGGGLVQPGGSLKLSCAASGFTFNTYAMNWVRQASGKGL | 172 |
| | | EWVGRIRSKYNNYATYYADSVKDRFTISRDDSKSTLYLQMNSLKTE | |
| | | DTAVYYCVRHGNFGNSYVSWFAYWGQGTLVTVSS | |
| | VL | QAVVTQEPSLTVSPGGTVTLTCRSSTGAVTTSNYANWVQQKPGQA | 173 |
| | | PRGLIGGTNKRAPWTPARFSGSLLGDKAALTLSGAQPEDEAEYFCA | |
| | | LWYSNLWVFGGGTKLTVL | |
| | scFv | EVQLVESGGGLVQPGGSLKLSCAASGFTFNTYAMNWVRQASGKGL | 174 |
| | | EWVGRIRSKYNNYATYYADSVKDRFTISRDDSKSTLYLQMNSLKTE | |
| | | DTAVYYCVRHGNFGNSYVSWFAYWGQGTLVTVSSGGGGSGGGG | |
| | | SGGGGSGGGGSQAVVTQEPSLTVSPGGTVTLTCRSSTGAVTTSNY | |
| | | ANWVQQKPGQAPRGLIGGTNKRAPWTPARFSGSLLGDKAALTLSG | |
| | | AQPEDEAEYFCALWYSNLWVFGGGTKLTVL | |
| CD3-22 | VH | EVQLVESGGGLVQPGGSLRLSCAASGFTFSTYAMNWVRQAPGKGL | 166 |
| | | EWVGRIRSKYNNYATYYADSVKGRFTISRDDSKNTLYLQMNSLRAE | |
| | | DTAVYYCVRHGNFGDSYVSWFAYWGQGTLVTVSS | |
| | VL | QAVVTQEPSLTVSPGGTVTLTCGSSTGAVTTSNYANWVQQKPGKS | 167 |
| | | PRGLIGGTNKRAPGVPARFSGSLLGGKAALTISGAQPEDEADYYCA | |
| | | LWYSNHWVFGGGTKLTVL | |
| | scFv | EVQLVESGGGLVQPGGSLRLSCAASGFTFSTYAMNWVRQAPGKGL | 175 |
| | | EWVGRIRSKYNNYATYYADSVKGRFTISRDDSKNTLYLQMNSLRAE | |
| | | DTAVYYCVRHGNFGDSYVSWFAYWGQGTLVTVSSGKPGSGKPGS | |
| | | GKPGSGKPGSQAVVTQEPSLTVSPGGTVTLTCGSSTGAVTTSNYA | |
| | | NWVQQKPGKSPRGLIGGTNKRAPGVPARFSGSLLGGKAALTISGA | |
| | | QPEDEADYYCALWYSNHWVFGGGTKLTVL | |
| CD3-23 | VH | EVQLVESGGGLVQPGGSLRLSCAASGFTFSTYAMNWVRQAPGKGL | 176 |
| | | EWVGRIRSKANNYATYYADSVKGRFTISRDDSKNTLYLQMNSLRAE | |
| | | DTAVYYCVRHGNFGDSYVSWFAYWGQGTLVTVSS | |
| | VL | QAVVTQEPSLTVSPGGTVTLTCGSSTGAVTTSNYANWVQQKPGKS | 167 |
| | | PRGLIGGTNKRAPGVPARFSGSLLGGKAALTISGAQPEDEADYYCA | |
| | | LWYSNHWVFGGGTKLTVL | |
| | scFv | EVQLVESGGGLVQPGGSLRLSCAASGFTFSTYAMNWVRQAPGKGL | 177 |
| | | EWVGRIRSKANNYATYYADSVKGRFTISRDDSKNTLYLQMNSLRAE | |
| | | DTAVYYCVRHGNFGDSYVSWFAYWGQGTLVTVSSGKPGSGKPGS | |
| | | GKPGSGKPGSQAVVTQEPSLTVSPGGTVTLTCGSSTGAVTTSNYA | |
| | | NWVQQKPGKSPRGLIGGTNKRAPGVPARFSGSLLGGKAALTISGA | |
| | | QPEDEADYYCALWYSNHWVFGGGTKLTVL | |
| CD3-24 | VH | EVQLVESGGGLVQPGGSLRLSCAASGFTFSTYAMNWVRQAPGKGL | 178 |
| | | EWVGRIRSKYNNYATYYADSVKGRFTISRDDSKNTLYLQMNSLRAE | |
| | | DTAVYYCVRHGNFGDEYVSWFAYWGQGTLVTVSS | |
| | VL | QAVVTQEPSLTVSPGGTVTLTCGSSTGAVTTSNYANWVQQKPGKS | 167 |
| | | PRGLIGGTNKRAPGVPARFSGSLLGGKAALTISGAQPEDEADYYCA | |
| | | LWYSNHWVFGGGTKLTVL | |
| | scFv | EVQLVESGGGLVQPGGSLRLSCAASGFTFSTYAMNWVRQAPGKGL | 179 |
| | | EWVGRIRSKYNNYATYYADSVKGRFTISRDDSKNTLYLQMNSLRAE | |
| | | DTAVYYCVRHGNFGDEYVSWFAYWGQGTLVTVSSGKPGSGKPGS | |
| | | GKPGSGKPGSQAVVTQEPSLTVSPGGTVTLTCGSSTGAVTTSNYA | |
| | | NWVQQKPGKSPRGLIGGTNKRAPGVPARFSGSLLGGKAALTISGA | |
| | | QPEDEADYYCALWYSNHWVFGGGTKLTVL | |
| CD3-25 | VH | EVQLVESGGGLVQPGGSLRLSCAASGFTFSTYAMNWVRQAPGKGL | 180 |
| | | EWVGRIRSKYNNYATYYADSVKGRFTISRDDSKNTLYLQMNSLRAE | |
| | | DTAVYYCVRHGNFGDPYVSWFAYWGQGTLVTVSS | |
| | VL | QAVVTQEPSLTVSPGGTVTLTCGSSTGAVTTSNYANWVQQKPGKS | 167 |
| | | PRGLIGGTNKRAPGVPARFSGSLLGGKAALTISGAQPEDEADYYCA | |
| | | LWYSNHWVFGGGTKLTVL | |
| | scFv | EVQLVESGGGLVQPGGSLRLSCAASGFTFSTYAMNWVRQAPGKGL | 181 |
| | | EWVGRIRSKYNNYATYYADSVKGRFTISRDDSKNTLYLQMNSLRAE | |
| | | DTAVYYCVRHGNFGDPYVSWFAYWGQGTLVTVSSGKPGSGKPGS | |
| | | GKPGSGKPGSQAVVTQEPSLTVSPGGTVTLTCGSSTGAVTTSNYA | |
| | | NWVQQKPGKSPRGLIGGTNKRAPGVPARFSGSLLGGKAALTISGA | |
| | | QPEDEADYYCALWYSNHWVFGGGTKLTVL | |
| CD3-26 | VH | EVQLVESGGGLVQPGGSLRLSCAASGFTFSTYAMNWVRQAPGKGL | 182 |
| | | EWVGRIRSKYNNYATYYADSVKGRFTISRDDSKNTLYLQMNSLRAE | |
| | | DTAVYYCVRHGNFGDSYVSWFDYWGQGTLVTVSS | |
| | VL | QAVVTQEPSLTVSPGGTVTLTCGSSTGAVTTSNYANWVQQKPGKS | 167 |
| | | PRGLIGGTNKRAPGVPARFSGSLLGGKAALTISGAQPEDEADYYCA | |
| | | LWYSNHWVFGGGTKLTVL | |
| | scFv | EVQLVESGGGLVQPGGSLRLSCAASGFTFSTYAMNWVRQAPGKGL | 183 |
| | | EWVGRIRSKYNNYATYYADSVKGRFTISRDDSKNTLYLQMNSLRAE | |
| | | DTAVYYCVRHGNFGDSYVSWFDYWGQGTLVTVSSGKPGSGKPGS | |
| | | GKPGSGKPGSQAVVTQEPSLTVSPGGTVTLTCGSSTGAVTTSNYA | |
| | | NWVQQKPGKSPRGLIGGTNKRAPGVPARFSGSLLGGKAALTISGA | |
| | | QPEDEADYYCALWYSNHWVFGGGTKLTVL | |
| CD3-27 | VH | EVQLVESGGGLVQPGGSLRLSCAASGFTFSTYAMSWVRQAPGKGL | 184 |
| | | EWVGRIRSKYNNYATYYADSVKGRFTISRDDSKNTLYLQMNSLRAE | |
| | | DTAVYYCVRHGNFGDSYVSWFAYWGQGTLVTVSS | |
| | VL | QAVVTQEPSLTVSPGGTVTLTCGSSTGAVTTSNYANWVQQKPGKS | 167 |
| | | PRGLIGGTNKRAPGVPARFSGSLLGGKAALTISGAQPEDEADYYCA | |
| | | LWYSNHWVFGGGTKLTVL | |
| | scFv | EVQLVESGGGLVQPGGSLRLSCAASGFTFSTYAMSWVRQAPGKGL | 185 |
| | | EWVGRIRSKYNNYATYYADSVKGRFTISRDDSKNTLYLQMNSLRAE | |
| | | DTAVYYCVRHGNFGDSYVSWFAYWGQGTLVTVSSGKPGSGKPGS | |
| | | GKPGSGKPGSQAVVTQEPSLTVSPGGTVTLTCGSSTGAVTTSNYA | |
| | | NWVQQKPGKSPRGLIGGTNKRAPGVPARFSGSLLGGKAALTISGA | |
| | | QPEDEADYYCALWYSNHWVFGGGTKLTVL | |
| CD3-28 | VH | EVQLVESGGGLVQPGGSLRLSCAASGFTFNTYAMNWVRQAPGKG | 164 |
| | | LEWVGRIRSKYNNYATYYADSVKGRFTISRDDSKNTLYLQMNSLRA | |
| | | EDTAVYYCVRHGNFGNSYVSWFAYWGQGTLVTVSS | |
| | VL | QAVVTQEPSLTVSPGGTVTLTCGSSTGAVTTSNYANWVQQKPGQA | 165 |
| | | PRGLIGGTNKRAPGVPARFSGSLLGGKAALTLSGAQPEDEAEYYCA | |
| | | LWYSNLWVFGGGTKLTVL | |
| | scFv | EVQLVESGGGLVQPGGSLRLSCAASGFTFNTYAMNWVRQAPGKG | 186 |
| | | LEWVGRIRSKYNNYATYYADSVKGRFTISRDDSKNTLYLQMNSLRA | |
| | | EDTAVYYCVRHGNFGNSYVSWFAYWGQGTLVTVSSGGGGSGGG | |
| | | GSGGGGSQAVVTQEPSLTVSPGGTVTLTCGSSTGAVTTSNYANWV | |
| | | QQKPGQAPRGLIGGTNKRAPGVPARFSGSLLGGKAALTLSGAQPE | |
| | | DEAEYYCALWYSNLWVFGGGTKLTVLGSHHHHHH | |
| CD3-129 | VH | EVQLVESGGGLVQPGGSLKLSCAASGFTFNTYAMNWVRQASGKGL | 187 |
| | | EWVGRIRSKYNNYATYYADSVKDRFTISRDDSKNTAYLQMNSLKTE | |
| | | DTAVYYCVRHGNFGNSYVSWFAHWGQGTLVTVSS | |
| | VL | QAVVTQEPSLTVSPGGTVTLTCGSSTGAVTSSNYANWVQQKPGQA | 188 |
| | | PRGLIGGTNKRAPWTPARFSGSLLGGKAALTLSGAQPEDEAEYYCA | |
| | | LWYSNLWVFGGGTKLTVL | |
| | scFv | EVQLVESGGGLVQPGGSLKLSCAASGFTFNTYAMNWVRQASGKGL | 189 |
| | | EWVGRIRSKYNNYATYYADSVKDRFTISRDDSKNTAYLQMNSLKTE | |
| | | DTAVYYCVRHGNFGNSYVSWFAHWGQGTLVTVSSGGGGSGGGG | |
| | | SGGGGSGGGGSQAVVTQEPSLTVSPGGTVTLTCGSSTGAVTSSNY | |
| | | ANWVQQKPGQAPRGLIGGTNKRAPWTPARFSGSLLGGKAALTLSG | |
| | | AQPEDEAEYYCALWYSNLWVFGGGTKLTVL | |
| CD3-130 | VH | EVQLVESGGGLVQPGGSLKLSCAASGFTFNTYAMNWVRQASGKGL | 190 |
| | | EWWVGRIRSKYNNYATYYADSVKDRFTISRDDSKSTAYLQMNSLKTE | |
| | | DTAVYYCVRHGNFGNSYVSWFAYWGQGTLVTVSS | |
| | VL | QAVVTQEPSLTVSPGGTVTLTCRSSTGAVTTSNYANWVQQKPGQA | 173 |
| | | PRGLIGGTNKRAPWTPARFSGSLLGDKAALTLSGAQPEDEAEYFCA | |
| | | LWYSNLWVFGGGTKLTVL | |
| | scFv | EVQLVESGGGLVQPGGSLKLSCAASGFTFNTYAMNWVRQASGKGL | 191 |
| | | EWVGRIRSKYNNYATYYADSVKDRFTISRDDSKSTAYLQMNSLKTE | |
| | | DTAVYYCVRHGNFGNSYVSWFAYWGQGTLVTVSSGGGGSGGGG | |
| | | SGGGGSGGGGSQAVVTQEPSLTVSPGGTVTLTCRSSTGAVTTSNY | |
| | | ANWVQQKPGQAPRGLIGGTNKRAPWTPARFSGSLLGDKAALTLSG | |
| | | AQPEDEAEYFCALWYSNLWVFGGGTKLTVL | |

[0567] CDR sequences for a number of CD3 binders as defined by the Kabat numbering scheme (Kabat et al, 1991, Sequences of Proteins of Immunological Interest, 5^{th} Ed. Public Health Service, National Institutes of Health, Bethesda, Md.), Chothia numbering scheme (A1-Lazikani et al., 1997, J. Mol. Biol 273:927-948), and a combination of Kabat and Chothia numbering are provided in Tables 121B-12D, respectively.

TABLE 12B
CD3 Binders-CDR sequences according to Kabat numbering scheme

| Binding | | | SEQ ID | | SEQ ID | | SEQ ID |
|---|---|---|---|---|---|---|---|
| Domain | Chain | CDR1 | NO: | CDR2 | NO: | CDR3 | NO: |
| CD3-1 | VH | RYTMH | 192 | YINPSRGYTNYNQK | 212 | YYDDHYCLDY | 236 |
| | | | | FKD | | | |
| | VL | SASSSVSYM | 193 | DTSKLAS | 213 | QQWSSNPFT | 237 |
| | | N | | | | | |
| CD3-2 | VH | TYAMN | 194 | RIRSKYNNYATYYA | 214 | HGNFGNSYVS | 238 |
| | | | | DSVKD | | WFAY | |
| | VL | RSSTGAVTT | 195 | GTNKRAP | 215 | ALWYSNLWV | 239 |
| | | SNYAN | | | | | |
| CD3-3 | VH | SYTMH | 196 | YINPSSGYTKYNQK | 216 | WQDYDVYFDY | 240 |
| | | | | FKD | | | |
| | VL | RASSSVSYM | 197 | ATSNLAS | 217 | QQWSSNPPT | 241 |
| | | H | | | | | |
| CD3-4 | VH | RYTMH | 192 | YINPSRGYTNYNQK | 212 | YYDDHYCLDY | 236 |
| | | | | FKD | | | |
| | VL | RASSSVSYM | 198 | DTSKVAS | 218 | QQWSSNPLT | 242 |
| | | N | | | | | |
| CD3-5 | VH | RYTMH | 192 | YINPSRGYTNYNQK | 219 | YYDDHYCLDY | 236 |
| | | | | VKD | | | |
| | VL | SASSSVSYM | 193 | DTSKLAS | 213 | QQWSSNPFT | 237 |
| | | N | | | | | |
| CD3-6 | VH | GYGMH | 199 | VIWYDGSKKYYVDS | 220 | QMGYWHFDL | 243 |
| | | | | VKG | | | |
| | VL | RASQSVSSY | 200 | DASNRAT | 221 | QQRSNWPPLT | 244 |
| | | LA | | | | | |
| CD3-7 | VH | TYAMN | 194 | RIRSKYNNYATYYA | 222 | VRHGNFGNSYV | 245 |
| | | | | D | | SWFAY | |
| | VL | RSSTGAVTT | 195 | GTNKRAP | 215 | ALWYSNLWV | 239 |
| | | SNYAN | | | | | |
| CD3-8 | VH | RYTMH | 192 | YINPSRGYTNYNQK | 212 | YYDDHYCLDY | 236 |
| | | | | FKD | | | |
| | VL | RASSSVSYM | 198 | DTSKVAS | 218 | QQWSSNPLT | 242 |
| | | N | | | | | |
| CD3-9 | VH | TYAMN | 194 | RIRSKYNNYATYYA | 222 | VRHGNFGNSYV | 245 |
| | | | | D | | SWFAY | |
| | VL | RSSTGAVTT | 195 | GTNKRAP | 215 | ALWYSNLWV | 239 |
| | | SNYAN | | | | | |
| CD3-10 | VH | TYAMN | 194 | RIRSKYNNYATYYA | 214 | HGNFGNSYVS | 238 |
| | | | | DSVKD | | WFAY | |
| | VL | RSSTGAVTT | 195 | GTNKRAP | 215 | ALWYSNLWV | 239 |
| | | SNYAN | | | | | |
| CD3-11 | VH | SYAMN | 201 | RIRSKYNNYATYYA | 223 | HGNFGNSYVS | 246 |
| | | | | DSVKG | | WWAY | |
| | VL | GSSTGAVTS | 202 | GTKFLAP | 224 | VLWYSNRWV | 247 |
| | | GNYPN | | | | | |
| CD3-12 | VH | KYAMN | 203 | RIRSKYNNYATYYA | 214 | HGNFGNSYISY | 248 |
| | | | | DSVKD | | WAY | |
| | VL | GSSTGAVTS | 202 | GTKFLAP | 224 | VLWYSNRWV | 247 |
| | | GNYPN | | | | | |
| CD3-13 | VH | RYTMH | 192 | YINPSRGYTNYNQK | 212 | YYDDHYCLDY | 236 |
| | | | | FKD | | | |
| | VL | SASSSVSYM | 193 | DTSKLAS | 213 | QQWSSNPFT | 237 |
| | | N | | | | | |
| CD3-14 | VH | TYAMN | 194 | RIRSKYNNYATYYA | 214 | HGNFGNSYVS | 238 |
| | | | | DSVKD | | WFAY | |
| | VL | RSSTGAVTT | 195 | GTNKRAP | 215 | ALWYSNLWV | 239 |
| | | SNYAN | | | | | |
| CD3-15 | VH | TYAMN | 194 | RIRSKYNNYATYYA | 214 | HGNFGNSYVS | 238 |
| | | | | DSVKD | | WFAY | |
| | VL | RSSTGAVTT | 195 | GTNKRAP | 215 | ALWYSNLWV | 239 |
| | | SNYAN | | | | | |
| CD3-16 | VH | TYAMN | 194 | RIRSKYNNYATYYA | 223 | HGNFGNSYVS | 238 |
| | | | | DSVKG | | WFAY | |
| | VL | GSSTGAVTT | 204 | GTNKRAP | 215 | ALWYSNLWV | 239 |
| | | SNYAN | | | | | |
| CD3-17 | VH | TYAMN | 194 | RIRSKYNNYATYYA | 223 | HGNFGDSYVS | 249 |
| | | | | DSVKG | | WFAY | |
| | VL | GSSTGAVTT | 204 | GTNKRAP | 215 | ALWYSNHWV | 250 |
| | | SNYAN | | | | | |
| CD3-18 | VH | RYTMH | 192 | YINPSRGYTNYNQK | 219 | YYDDHYCLDY | 236 |
| | | | | VKD | | | |
| | VL | SASSSVSYM | 193 | DTSKLAS | 213 | QQWSSNPFT | 237 |
| | | N | | | | | |
| CD3-19 | VH | RYTMH | 192 | YINPSRGYTNYNQK | 219 | YYDDHYSLDY | 251 |
| | | | | VKD | | | |
| | VL | SASSSVSYM | 193 | DTSKLAS | 213 | QQWSSNPFT | 237 |
| | | N | | | | | |
| CD3-20 | VH | GYTMN | 205 | LINPYKGVSTYNQKF | 225 | SGYYGDSDWYF | 252 |
| | | | | KD | | DV | |
| | VL | RASQDIRNY | 206 | YTSRLH | 226 | QQGNTLPWT | 253 |
| | | LN | | | | | |
| CD3-21 | VH | TYAMN | 194 | RIRSKYNNYATYYA | 214 | HGNFGNSYVS | 238 |
| | | | | DSVKD | | WFAY | |
| | VL | RSSTGAVTT | 195 | GTNKRAP | 215 | ALWYSNLWV | 239 |
| | | SNYAN | | | | | |
| CD3-22 | VH | TYAMN | 194 | RIRSKYNNYATYY | 223 | HGNFGDSYVS | 249 |
| | | | | ADSVKG | | WFAY | |
| | VL | GSSTGAVT | 204 | GTNKRAP | 215 | ALWYSNHWV | 250 |
| | | TSNYAN | | | | | |
| CD3-23 | VH | TYAMN | 194 | RIRSKANNYATYY | 227 | HGNFGDSYVS | 249 |
| | | | | ADSVKG | | WFAY | |
| | VL | GSSTGAVT | 204 | GTNKRAP | 215 | ALWYSNHWV | 250 |
| | | TSNYAN | | | | | |
| CD3-24 | VH | TYAMN | 194 | RIRSKYNNYATYY | 223 | HGNFGDEYVS | 254 |
| | | | | ADSVKG | | WFAY | |
| | VL | GSSTGAVT | 204 | GTNKRAP | 215 | ALWYSNHWV | 250 |
| | | TSNYAN | | | | | |
| CD3-25 | VH | TYAMN | 194 | RIRSKYNNYATYY | 223 | HGNFGDPYVS | 255 |
| | | | | ADSVKG | | WFAY | |
| | VL | GSSTGAVT | 204 | GTNKRAP | 215 | ALWYSNHWV | 250 |
| | | TSNYAN | | | | | |
| CD3-26 | VH | TYAMN | 194 | RIRSKYNNYATYY | 223 | HGNFGDSYVS | 256 |
| | | | | ADSVKG | | WFDY | |
| | VL | GSSTGAVT | 204 | GTNKRAP | 215 | ALWYSNHWV | 250 |
| | | TSNYAN | | | | | |
| CD3-27 | VH | TYAMS | 207 | RIRSKYNNYATYY | 223 | HGNFGDSYVS | 249 |
| | | | | ADSVKG | | WFAY | |
| | VL | GSSTGAVT | 204 | GTNKRAP | 215 | ALWYSNHWV | 250 |
| | | TSNYAN | | | | | |
| CD3-28 | VH | TYAMN | 194 | RIRSKYNNYATYY | 223 | HGNFGNSYVS | 238 |
| | | | | ADSVKG | | WFAY | |
| | VL | GSSTGAVT | 204 | GTNKRAP | 215 | ALWYSNLWV | 239 |
| | | TSNYAN | | | | | |
| CD3-29 | VH | TYAMN | 194 | RIRSKYNNYATYY | 223 | HGNFGNSYVS | 238 |
| | | | | ADSVKG | | WFAY | |
| | VL | GSSTGAVT | 204 | GTNKRAP | 215 | ALWYSNLWV | 239 |
| | | TSNYAN | | | | | |
| CD3-30 | VH | TYAMN | 194 | RIRSKYNNYATYY | 223 | HGNFGNSYVS | 238 |
| | | | | ADSVKG | | WFAY | |
| | VL | GSSTGAVT | 204 | GTNKRAP | 215 | ALWYSNLWV | 239 |
| | | TSNYAN | | | | | |
| CD3-31 | VH | TYAMN | 194 | RIRSKYNNYATYY | 223 | HGNFGNSYVS | 238 |
| | | | | ADSVKG | | WFAY | |
| | VL | GSSTGAVT | 204 | GTNKRAP | 215 | ALWYSNLWV | 239 |
| | | TSNYAN | | | | | |
| CD3-32 | VH | TYAMN | 194 | RIRSKYNNYATYY | 223 | HGNFGNSYVS | 238 |
| | | | | ADSVKG | | WFAY | |
| | VL | GSSTGAVT | 204 | GTNKRAP | 215 | ALWYSNLWV | 239 |
| | | TSNYAN | | | | | |
| CD3-33 | VH | TYAMN | 194 | RIRSKYNNYATYY | 223 | HGNFGNSYVS | 238 |
| | | | | ADSVKG | | WFAY | |
| | VL | GSSTGAVT | 204 | GTNKRAP | 215 | ALWYSNLWV | 239 |
| | | TSNYAN | | | | | |
| CD3-34 | VH | TYAMN | 194 | RIRSKYNNYATYY | 223 | HGNFGNSYVS | 238 |
| | | | | ADSVKG | | WFAY | |
| | VL | GSSTGAVT | 204 | GTNKRAP | 215 | ALWYSNLWV | 239 |
| | | TSNYAN | | | | | |
| CD3-35 | VH | TYAMH | 208 | RIRSKYNNYATYY | 223 | HGNFGNSYVS | 238 |
| | | | | ADSVKG | | WFAY | |
| | VL | GSSTGAVT | 204 | GTNKRAP | 215 | ALWYSNLWV | 239 |
| | | TSNYAN | | | | | |
| CD3-36 | VH | TYAMS | 207 | RIRSKYNNYATYY | 223 | HGNFGNSYVS | 238 |
| | | | | ADSVKG | | WFAY | |
| | VL | GSSTGAVT | 204 | GTNKRAP | 215 | ALWYSNLWV | 239 |
| | | TSNYAN | | | | | |
| CD3-37 | VH | TYAMN | 194 | RIRSKYNNYATYY | 223 | HGNFGNSYVS | 238 |
| | | | | ADSVKG | | WFAY | |
| | VL | GSSTGAVT | 204 | GTNKRAP | 215 | ALWYSNLWV | 239 |
| | | TSNYAN | | | | | |
| CD3-38 | VH | TYAMN | 194 | RIRSKANNYYATY | 228 | HGNFGNSYVS | 238 |
| | | | | YADSVKG | | WFAY | |
| | VL | GSSTGAVT | 204 | GTNKRAP | 215 | ALWYSNLWV | 239 |
| | | TSNYAN | | | | | |
| CD3-39 | VH | TYAMN | 194 | RIRSKANSYATYY | 229 | HGNFGNSYVS | 238 |
| | | | | ADSVKG | | WFAY | |
| | VL | GSSTGAVT | 204 | GTNKRAP | 215 | ALWYSNLWV | 239 |
| | | TSNYAN | | | | | |
| CD3-40 | VH | TYAMN | 194 | RIRSKYNNYATAY | 230 | HGNFGNSYVS | 238 |
| | | | | ADSVKG | | WFAY | |
| | VL | GSSTGAVT | 204 | GTNKRAP | 215 | ALWYSNLWV | 239 |
| | | TSNYAN | | | | | |
| CD3-41 | VH | TYAMN | 194 | RIRSKYNNYATYY | 223 | HGNFGNSYVS | 238 |
| | | | | ADSVKG | | WFAY | |
| | VL | GSSTGAVT | 204 | GTNKRAP | 215 | ALWYSNLWV | 239 |
| | | TSNYAN | | | | | |
| CD3-42 | VH | TYAMN | 194 | RIRSKYNNYATYY | 223 | HGNFGNSYVS | 238 |
| | | | | ADSVKG | | WFAY | |
| | VL | GSSTGAVT | 204 | GTNKRAP | 215 | ALWYSNLWV | 239 |
| | | TSNYAN | | | | | |
| CD3-43 | VH | TYAMN | 194 | RIRSKYNNYATYY | 223 | HGNFGNSYVS | 238 |
| | | | | ADSVKG | | WFAY | |
| | VL | GSSTGAVT | 204 | GTNKRAP | 215 | ALWYSNLWV | 239 |
| | | TSNYAN | | | | | |
| CD3-44 | VH | TYAMN | 194 | RIRSKYNNYATYY | 223 | HGNFGNSYVS | 238 |
| | | | | ADSVKG | | WFAY | |
| | VL | GSSTGAVT | 204 | GTNKRAP | 215 | ALWYSNLWV | 239 |
| | | TSNYAN | | | | | |
| CD3-45 | VH | TYAMN | 194 | RIRSKYNNYATYY | 223 | HGNFGNSYVS | 238 |
| | | | | ADSVKG | | WFAY | |
| | VL | GSSTGAVT | 204 | GTNKRAP | 215 | ALWYSNLWV | 239 |
| | | TSNYAN | | | | | |
| CD3-46 | VH | TYAMN | 194 | RIRSKYNNYATYY | 223 | HGNFGNSYVS | 238 |
| | | | | ADSVKG | | WFAY | |
| | VL | GSSTGAVT | 204 | GTNKRAP | 215 | ALWYSNLWV | 239 |
| | | TSNYAN | | | | | |
| CD3-47 | VH | TYAMN | 194 | RIRSKYNNYATYY | 223 | HGNFGNSYVS | 238 |
| | | | | ADSVKG | | WFAY | |
| | VL | GSSTGAVT | 204 | GTNKRAP | 215 | ALWYSNLWV | 239 |
| | | TSNYAN | | | | | |
| CD3-48 | VH | TYAMN | 194 | RIRSKYNNYATYY | 223 | HGNFGNSYVS | 238 |
| | | | | ADSVKG | | WFAY | |
| | VL | GSSTGAVT | 204 | GTNKRAP | 215 | ALWYSNLWV | 239 |
| | | TSNYAN | | | | | |
| CD3-49 | VH | TYAMN | 194 | RIRSKYNNYATYY | 223 | HGNFGNSYVS | 238 |
| | | | | ADSVKG | | WFAY | |
| | VL | GSSTGAVT | 204 | GTNKRAP | 215 | ALWYSNLWV | 239 |
| | | TSNYAN | | | | | |
| CD3-50 | VH | TYAMN | 194 | RIRSKYNNYATYY | 223 | HGNFGDSYVS | 249 |
| | | | | ADSVKG | | WFAY | |
| | VL | GSSTGAVT | 204 | GTNKRAP | 215 | ALWYSNLWV | 239 |
| | | TSNYAN | | | | | |
| CD3-51 | VH | TYAMN | 194 | RIRSKYNNYATYY | 223 | HGNFGQSYVS | 257 |
| | | | | ADSVKG | | WFAY | |
| | VL | GSSTGAVT | 204 | GTNKRAP | 215 | ALWYSNLWV | 239 |
| | | TSNYAN | | | | | |
| CD3-52 | VH | TYAMN | 194 | RIRSKYNNYATYY | 223 | HGNFGNSYVS | 238 |
| | | | | ADSVKG | | WFAY | |
| | VL | GSSTGAVT | 204 | GTNKRAP | 215 | ALWYSNLWV | 239 |
| | | TSNYAN | | | | | |
| CD3-53 | VH | TYAMN | 194 | RIRSKYNNYATYY | 223 | HGNFGNSYVS | 258 |
| | | | | ADSVKG | | WFDY | |
| | VL | GSSTGAVT | 204 | GTNKRAP | 215 | ALWYSNLWV | 239 |
| | | TSNYAN | | | | | |
| CD3-54 | VH | TYAMN | 194 | RIRSKYNNYATYY | 223 | HGNFGNSYVS | 238 |
| | | | | ADSVKG | | WFAY | |
| | VL | GSSTGAVT | 204 | GTNKRAP | 215 | ALWYSNLWV | 239 |
| | | TSNYAN | | | | | |
| CD3-55 | VH | TYAMN | 194 | RIRSKYNNYATYY | 223 | HGNFGNSYVS | 238 |
| | | | | ADSVKG | | WFAY | |
| | VL | GSSTGAVT | 204 | GTNKRAP | 215 | ALWYSNLWV | 239 |
| | | TSNYAN | | | | | |
| CD3-56 | VH | TYAMN | 194 | RIRSKYNNYATYY | 223 | HGNFGNSYVS | 238 |
| | | | | ADSVKG | | WFAY | |
| | VL | GSSTGAVT | 204 | GTNKRAP | 215 | ALWYSNLWV | 239 |
| | | TSNYAN | | | | | |
| CD3-57 | VH | TYAMN | 194 | RIRSKYNNYATYY | 223 | HGNFGNSYVS | 238 |
| | | | | ADSVKG | | WFAY | |
| | VL | GSSTGAVT | 204 | GTNKRAP | 215 | ALWYSNLWV | 239 |
| | | TSNYAN | | | | | |
| CD3-58 | VH | TYAMN | 194 | RIRSKYNNYATYY | 223 | HGNFGNSYVS | 238 |
| | | | | ADSVKG | | WFAY | |
| | VL | GSSTGAVT | 204 | GTNKRAP | 215 | ALWYSNLWV | 239 |
| | | TSNYAN | | | | | |
| CD3-59 | VH | TYAMN | 194 | RIRSKYNNYATYY | 223 | HGNFGNSYVS | 238 |
| | | | | ADSVKG | | WFAY | |
| | VL | GSSTGAVT | 204 | GTNKRAP | 215 | ALWYSNLWV | 239 |
| | | TSNYAN | | | | | |
| CD3-60 | VH | TYAMN | 194 | RIRSKYNNYATYY | 223 | HGNFGNSYVS | 238 |
| | | | | ADSVKG | | WFAY | |
| | VL | GSSTGAVT | 209 | GTNKRAP | 215 | ALWYSNLWV | 239 |
| | | SSNYAN | | | | | |
| CD3-61 | VH | TYAMN | 194 | RIRSKYNNYATYY | 223 | HGNFGNSYVS | 238 |
| | | | | ADSVKG | | WFAY | |
| | VL | GSSTGAVT | 210 | GTNKRAP | 215 | ALWYSNLWV | 239 |
| | | SGHYAN | | | | | |
| CD3-62 | VH | TYAMN | 194 | RIRSKYNNYATYY | 223 | HGNFGNSYVS | 238 |
| | | | | ADSVKG | | WFAY | |
| | VL | GSSTGAVT | 204 | DTNKRAP | 231 | ALWYSNLWV | 239 |
| | | TSNYAN | | | | | |
| CD3-63 | VH | TYAMN | 194 | RIRSKYNNYATYY | 223 | HGNFGNSYVS | 238 |
| | | | | ADSVKG | | WFAY | |
| | VL | GSSTGAVT | 204 | GTNNRAP | 232 | ALWYSNLWV | 239 |
| | | TSNYAN | | | | | |
| CD3-64 | VH | TYAMN | 194 | RIRSKYNNYATYY | 223 | HGNFGNSYVS | 238 |
| | | | | ADSVKG | | WFAY | |
| | VL | GSSTGAVT | 204 | GTNKRAS | 233 | ALWYSNLWV | 239 |
| | | TSNYAN | | | | | |
| CD3-65 | VH | TYAMN | 194 | RIRSKYNNYATYY | 223 | HGNFGNSYVS | 238 |
| | | | | ADSVKG | | WFAY | |
| | VL | GSSTGAVT | 204 | GTSNKHS | 234 | ALWYSNLWV | 239 |
| | | TSNYAN | | | | | |
| CD3-66 | VH | TYAMN | 194 | RIRSKYNNYATYY | 223 | HGNFGNSYVS | 238 |
| | | | | ADSVKG | | WFAY | |
| | VL | GSSTGAVT | 204 | GTNKRAP | 215 | ALWYSNLWV | 239 |
| | | TSNYAN | | | | | |
| CD3-67 | VH | TYAMN | 194 | RIRSKYNNYATYY | 223 | HGNFGNSYVS | 238 |
| | | | | ADSVKG | | WFAY | |
| | VL | GSSTGAVT | 204 | GTNKRAP | 215 | ALWYSNLWV | 239 |
| | | TSNYAN | | | | | |
| CD3-68 | VH | TYAMN | 194 | RIRSKYNNYATYY | 223 | HGNFGNSYVS | 238 |
| | | | | ADSVKG | | WFAY | |
| | VL | GSSTGAVT | 204 | GTNKRAP | 215 | ALWYSNLWV | 239 |
| | | TSNYAN | | | | | |
| CD3-69 | VH | TYAMN | 194 | RIRSKYNNYATYY | 223 | HGNFGNSYVS | 238 |
| | | | | ADSVKG | | WFAY | |
| | VL | GSSTGAVT | 204 | GTNKRAP | 215 | ALWYSNLWV | 239 |
| | | TSNYAN | | | | | |
| CD3-70 | VH | TYAMN | 194 | RIRSKYNNYATYY | 223 | HGNFGNSYVS | 238 |
| | | | | ADSVKG | | WFAY | |
| | VL | GSSTGAVT | 204 | GTNKRAP | 215 | ALWYSNLWV | 239 |
| | | TSNYAN | | | | | |
| CD3-71 | VH | TYAMN | 194 | RIRSKYNNYATYY | 223 | HGNFGNSYVS | 238 |
| | | | | ADSVKG | | WFAY | |
| | VL | GSSTGAVT | 204 | GTNKRAP | 215 | ALWYSNLWV | 239 |
| | | TSNYAN | | | | | |
| CD3-72 | VH | TYAMN | 194 | RIRSKYNNYATYY | 223 | HGNFGNSYVS | 238 |
| | | | | ADSVKG | | WFAY | |
| | VL | GSSTGAVT | 204 | GTNKRAP | 215 | ALWYSNLWV | 239 |
| | | TSNYAN | | | | | |
| CD3-73 | VH | TYAMN | 194 | RIRSKYNNYATYY | 223 | HGNFGNSYVS | 238 |
| | | | | ADSVKG | | WFAY | |
| | VL | GSSTGAVT | 204 | GTNKRAP | 215 | LLWYSNLWV | 259 |
| | | TSNYAN | | | | | |
| CD3-74 | VH | TYAMN | 194 | RIRSKYNNYATYY | 223 | HGNFGNSYVS | 238 |
| | | | | ADSVKG | | WFAY | |
| | VL | GSSTGAVT | 204 | GTNKRAP | 215 | ALWYSNHWV | 250 |
| | | TSNYAN | | | | | |
| CD3-75 | VH | TYAMN | 194 | RIRSKYNNYATYY | 223 | HGNFGNSYVS | 238 |
| | | | | ADSVKG | | WFAY | |
| | VL | GSSTGAVT | 204 | GTNKRAP | 215 | ALWYSNLWV | 239 |
| | | TSNYAN | | | | | |
| CD3-76 | VH | TYAMN | 194 | RIRSKYNNYATYY | 223 | HGNFGNSYVS | 238 |
| | | | | ADSVKG | | WFAY | |
| | VL | RSSTGAVT | 195 | GTNKRAP | 215 | ALWYSNLWV | 239 |
| | | TSNYAN | | | | | |
| CD3-77 | VH | TYAMN | 194 | RIRSKYNNYATYY | 223 | HGNFGNSYVS | 238 |
| | | | | ADSVKG | | WFAY | |
| | VL | KSSTGAVT | 211 | GTNKRAP | 215 | ALWYSNLWV | 239 |
| | | TSNYAN | | | | | |
| CD3-78 | VH | TYAMN | 194 | RIRSKYNNYATYY | 223 | HGNFGNSYVS | 238 |
| | | | | ADSVKG | | WFAY | |
| | VL | GSSTGAVT | 204 | GTNKRAP | 215 | ALWYSNHWV | 250 |
| | | TSNYAN | | | | | |
| CD3-79 | VH | TYAMN | 194 | RIRSKYNNYATYY | 223 | HGNFGNSYVS | 238 |
| | | | | ADSVKG | | WFAY | |
| | VL | GSSTGAVT | 204 | GTNKRAP | 215 | ALWYSNLWV | 239 |
| | | TSNYAN | | | | | |
| CD3-80 | VH | TYAMN | 194 | RIRSKYNNYATYY | 223 | HGNFGNSYVS | 238 |
| | | | | ADSVKG | | WFAY | |
| | VL | GSSTGAVT | 204 | GTNKRAP | 215 | ALWYSNLWV | 239 |
| | | TSNYAN | | | | | |
| CD3-81 | VH | TYAMN | 194 | RIRSKYNNYATYY | 223 | HGNFGNSYVS | 238 |
| | | | | ADSVKG | | WFAY | |
| | VL | GSSTGAVT | 204 | GTNKRAP | 215 | ALWYSNLWV | 239 |
| | | TSNYAN | | | | | |
| CD3-82 | VH | TYAMN | 194 | RIRSKYNNYATYY | 223 | HGNFGNSYVS | 238 |
| | | | | ADSVKG | | WFAY | |
| | VL | GSSTGAVT | 204 | GTNKRAP | 215 | ALWYSNLWV | 239 |
| | | TSNYAN | | | | | |
| CD3-83 | VH | TYAMN | 194 | RIRSKYNNYATYY | 223 | HGNFGNSYVS | 238 |
| | | | | ADSVKG | | WFAY | |
| | VL | GSSTGAVT | 204 | GTNKRAP | 215 | ALWYSNLWV | 239 |
| | | TSNYAN | | | | | |
| CD3-84 | VH | TYAMN | 194 | RIRSKYNNYATYY | 223 | HGNFGNSYVS | 238 |
| | | | | ADSVKG | | WFAY | |
| | VL | GSSTGAVT | 204 | GTNKRAP | 215 | ALWYSNLWV | 239 |
| | | TSNYAN | | | | | |
| CD3-85 | VH | TYAMN | 194 | RIRSKYNNYATYY | 223 | HGNFGNSYVS | 238 |
| | | | | ADSVKG | | WFAY | |
| | VL | GSSTGAVT | 204 | GTNKRAP | 215 | ALWYSNLWV | 239 |
| | | TSNYAN | | | | | |
| CD3-86 | VH | TYAMN | 194 | RIRSKYNNYATYY | 223 | HGNFGNSYVS | 238 |
| | | | | ADSVKG | | WFAY | |
| | VL | GSSTGAVT | 204 | GTNKRAP | 215 | ALWYSNLWV | 239 |
| | | TSNYAN | | | | | |
| CD3-87 | VH | TYAMN | 194 | RIRSKYNNYATYY | 223 | HGNFGDSYVS | 249 |
| | | | | ADSVKG | | WFAY | |
| | VL | GSSTGAVT | 204 | GTNKRAP | 215 | ALWYSNLWV | 239 |
| | | TSNYAN | | | | | |
| CD3-88 | VH | TYAMN | 194 | RIRSKYNNYATYY | 223 | HGNFGDSYVS | 249 |
| | | | | ADSVKG | | WFAY | |
| | VL | GSSTGAVT | 204 | GTNKRAP | 215 | ALWYSNLWV | 239 |
| | | TSNYAN | | | | | |
| CD3-89 | VH | TYAMN | 194 | RIRSKANNYATYY | 227 | HGNFGDSYVS | 249 |
| | | | | ADSVKG | | WFAY | |
| | VL | GSSTGAVT | 204 | GTNKRAP | 215 | ALWYSNLWV | 239 |
| | | TSNYAN | | | | | |
| CD3-90 | VH | TYAMN | 194 | RIRSKYNNYATYY | 223 | HGNFGDSYVS | 256 |
| | | | | ADSVKG | | WFDY | |
| | VL | GSSTGAVT | 204 | GTNKRAP | 215 | ALWYSNLWV | 239 |
| | | TSNYAN | | | | | |
| CD3-91 | VH | TYAMS | 207 | RIRSKANNYATYY | 227 | HGNFGDSYVS | 256 |
| | | | | ADSVKG | | WFDY | |
| | VL | GSSTGAVT | 204 | GTNKRAP | 215 | ALWYSNLWV | 239 |
| | | TSNYAN | | | | | |
| CD3-92 | VH | TYAMN | 194 | RIRSNGGYSTYYA | 235 | HGNFGNSYVS | 238 |
| | | | | DSVKG | | WFAY | |
| | VL | GSSTGAVT | 204 | GTNKRAP | 215 | ALWYSNLWV | 239 |
| | | TSNYAN | | | | | |
| CD3-93 | VH | TYAMN | 194 | RIRSKYNNYATYY | 223 | HGNFGNSYVS | 238 |
| | | | | ADSVKG | | WFAY | |
| | VL | GSSTGAVT | 204 | GTNKRAP | 215 | ALWYSNLWV | 239 |
| | | TSNYAN | | | | | |
| CD3-94 | VH | TYAMN | 194 | RIRSKYNNYATYY | 223 | HGNFGNSYVS | 238 |
| | | | | ADSVKG | | WFAY | |
| | VL | GSSTGAVT | 204 | GTNKRAP | 215 | ALWYSNLWV | 239 |
| | | TSNYAN | | | | | |
| CD3-95 | VH | TYAMN | 194 | RIRSKYNNYATYY | 223 | HGNFGNSYVS | 238 |
| | | | | ADSVKG | | WFAY | |
| | VL | GSSTGAVT | 204 | GTNKRAP | 215 | ALWYSNLWV | 239 |
| | | TSNYAN | | | | | |
| CD3-96 | VH | TYAMN | 194 | RIRSKYNNYATYY | 223 | HGNFGNSYVS | 238 |
| | | | | ADSVKG | | WFAY | |
| | VL | GSSTGAVT | 204 | GTNKRAP | 215 | ALWYSNHWV | 250 |
| | | TSNYAN | | | | | |
| CD3-97 | VH | TYAMN | 194 | RIRSKYNNYATYY | 223 | HGNFGDSYVS | 249 |
| | | | | ADSVKG | | WFAY | |
| | VL | GSSTGAVT | 204 | GTNKRAP | 215 | ALWYSNHWV | 250 |
| | | TSNYAN | | | | | |
| CD3-98 | VH | TYAMN | 194 | RIRSKYNNYATYY | 223 | HGNFGNSYVS | 238 |
| | | | | ADSVKG | | WFAY | |
| | VL | GSSTGAVT | 204 | GTNKRAP | 215 | ALWYSNHWV | 250 |
| | | TSNYAN | | | | | |
| CD3-99 | VH | TYAMN | 194 | RIRSKYNNYATYY | 223 | HGNFGNSYVS | 238 |
| | | | | ADSVKG | | WFAY | |
| | VL | GSSTGAVT | 204 | GTNKRAP | 215 | ALWYSNHWV | 250 |
| | | TSNYAN | | | | | |
| CD3-100 | VH | TYAMN | 194 | RIRSKYNNYATYY | 223 | HGNFGDSYVS | 249 |
| | | | | ADSVKG | | WFAY | |
| | VL | GSSTGAVT | 204 | GTNKRAP | 215 | ALWYSNHWV | 250 |
| | | TSNYAN | | | | | |
| CD3-101 | VH | TYAMN | 194 | RIRSKYNNYATYY | 223 | HGNFGDSYVS | 249 |
| | | | | ADSVKG | | WFAY | |
| | VL | GSSTGAVT | 204 | GTNKRAP | 215 | ALWYSNHWV | 250 |
| | | TSNYAN | | | | | |
| CD3-102 | VH | TYAMN | 194 | RIRSKYNNYATYY | 223 | HGNFGNSYVS | 238 |
| | | | | ADSVKG | | WFAY | |
| | VL | GSSTGAVT | 204 | GTNKRAP | 215 | ALWYSNHWV | 250 |
| | | TSNYAN | | | | | |
| CD3-103 | VH | TYAMN | 194 | RIRSKYNNYATYY | 223 | HGNFGNSYVS | 238 |
| | | | | ADSVKG | | WFAY | |
| | VL | GSSTGAVT | 204 | GTNKRAP | 215 | ALWYSNHWV | 250 |
| | | TSNYAN | | | | | |
| CD3-104 | VH | TYAMN | 194 | RIRSKYNNYATYY | 223 | HGNFGDSYVS | 249 |
| | | | | ADSVKG | | WFAY | |
| | VL | GSSTGAVT | 204 | GTNKRAP | 215 | ALWYSNHWV | 250 |
| | | TSNYAN | | | | | |
| CD3-105 | VH | TYAMN | 194 | RIRSKYNNYATYY | 223 | HGNFGDSYVS | 249 |
| | | | | ADSVKG | | WFAY | |
| | VL | GSSTGAVT | 204 | GTNKRAP | 215 | ALWYSNHWV | 250 |
| | | TSNYAN | | | | | |
| CD3-106 | VH | TYAMN | 194 | RIRSKYNNYATYY | 223 | HGNFGNSYVS | 238 |
| | | | | ADSVKG | | WFAY | |
| | VL | GSSTGAVT | 204 | GTNKRAP | 215 | ALWYSNHWV | 250 |
| | | TSNYAN | | | | | |
| CD3-107 | VH | TYAMN | 194 | RIRSKYNNYATYY | 223 | HGNFGNSYVS | 238 |
| | | | | ADSVKG | | WFAY | |
| | VL | GSSTGAVT | 204 | GTNKRAP | 215 | ALWYSNHWV | 250 |
| | | TSNYAN | | | | | |
| CD3-108 | VH | TYAMN | 194 | RIRSKYNNYATYY | 223 | HGNFGDSYVS | 249 |
| | | | | ADSVKG | | WFAY | |
| | VL | GSSTGAVT | 204 | GTNKRAP | 215 | ALWYSNHWV | 250 |
| | | TSNYAN | | | | | |
| CD3-109 | VH | TYAMN | 194 | RIRSKYNNYATYY | 223 | HGNFGDSYVS | 249 |
| | | | | ADSVKG | | WFAY | |
| | VL | GSSTGAVT | 204 | GTNKRAP | 215 | ALWYSNHWV | 250 |
| | | TSNYAN | | | | | |
| CD3-110 | VH | TYAMN | 194 | RIRSKYNNYATYY | 223 | HGNFGNSYVS | 238 |
| | | | | ADSVKG | | WFAY | |
| | VL | GSSTGAVT | 204 | GTNKRAP | 215 | ALWYSNHWV | 250 |
| | | TSNYAN | | | | | |
| CD3-111 | VH | TYAMN | 194 | RIRSKYNNYATYY | 223 | HGNFGNSYVS | 238 |
| | | | | ADSVKG | | WFAY | |
| | VL | GSSTGAVT | 204 | GTNKRAP | 215 | ALWYSNHWV | 250 |
| | | TSNYAN | | | | | |
| CD3-112 | VH | TYAMN | 194 | RIRSKYNNYATYY | 223 | HGNFGDSYVS | 249 |
| | | | | ADSVKG | | WFAY | |
| | VL | GSSTGAVT | 204 | GTNKRAP | 215 | ALWYSNHWV | 250 |
| | | TSNYAN | | | | | |
| CD3-113 | VH | TYAMN | 194 | RIRSKYNNYATYY | 223 | HGNFGDSYVS | 249 |
| | | | | ADSVKG | | WFAY | |
| | VL | GSSTGAVT | 204 | GTNKRAP | 215 | ALWYSNHWV | 250 |
| | | TSNYAN | | | | | |
| CD3-114 | VH | TYAMN | 194 | RIRSKYNNYATYY | 223 | HGNFGNSYVS | 238 |
| | | | | ADSVKG | | WFAY | |
| | VL | GSSTGAVT | 204 | GTNKRAP | 215 | ALWYSNHWV | 250 |
| | | TSNYAN | | | | | |
| CD3-115 | VH | TYAMN | 194 | RIRSKYNNYATYY | 223 | HGNFGNSYVS | 238 |
| | | | | ADSVKG | | WFAY | |
| | VL | GSSTGAVT | 204 | GTNKRAP | 215 | ALWYSNHWV | 250 |
| | | TSNYAN | | | | | |
| CD3-116 | VH | TYAMN | 194 | RIRSKYNNYATYY | 223 | HGNFGDSYVS | 249 |
| | | | | ADSVKG | | WFAY | |
| | VL | GSSTGAVT | 204 | GTNKRAP | 215 | ALWYSNHWV | 250 |
| | | TSNYAN | | | | | |
| CD3-117 | VH | TYAMN | 194 | RIRSKYNNYATYY | 223 | HGNFGDSYVS | 249 |
| | | | | ADSVKG | | WFAY | |
| | VL | GSSTGAVT | 204 | GTNKRAP | 215 | ALWYSNHWV | 250 |
| | | TSNYAN | | | | | |
| CD3-118 | VH | TYAMN | 194 | RIRSKYNNYATYY | 223 | HGNFGNSYVS | 238 |
| | | | | ADSVKG | | WFAY | |
| | VL | GSSTGAVT | 204 | GTNKRAP | 215 | ALWYSNHWV | 250 |
| | | TSNYAN | | | | | |
| CD3-119 | VH | TYAMN | 194 | RIRSKYNNYATYY | 223 | HGNFGNSYVS | 238 |
| | | | | ADSVKG | | WFAY | |
| | VL | GSSTGAVT | 204 | GTNKRAP | 215 | ALWYSNHWV | 250 |
| | | TSNYAN | | | | | |
| CD3-120 | VH | TYAMN | 194 | RIRSKYNNYATYY | 223 | HGNFGDSYVS | 249 |
| | | | | ADSVKG | | WFAY | |
| | VL | GSSTGAVT | 204 | GTNKRAP | 215 | ALWYSNHWV | 250 |
| | | TSNYAN | | | | | |
| CD3-121 | VH | TYAMN | 194 | RIRSKYNNYATYY | 223 | HGNFGDSYVS | 249 |
| | | | | ADSVKG | | WFAY | |
| | VL | GSSTGAVT | 204 | GTNKRAP | 215 | ALWYSNHWV | 250 |
| | | TSNYAN | | | | | |
| CD3-122 | VH | TYAMN | 194 | RIRSKYNNYATYY | 223 | HGNFGNSYVS | 238 |
| | | | | ADSVKG | | WFAY | |
| | VL | GSSTGAVT | 204 | GTNKRAP | 215 | ALWYSNHWV | 250 |
| | | TSNYAN | | | | | |
| CD3-123 | VH | TYAMN | 194 | RIRSKYNNYATYY | 223 | HGNFGNSYVS | 238 |
| | | | | ADSVKG | | WFAY | |
| | VL | GSSTGAVT | 204 | GTNKRAP | 215 | ALWYSNHWV | 250 |
| | | TSNYAN | | | | | |
| CD3-124 | VH | TYAMN | 194 | RIRSKYNNYATYY | 223 | HGNFGDSYVS | 249 |
| | | | | ADSVKG | | WFAY | |
| | VL | GSSTGAVT | 204 | GTNKRAP | 215 | ALWYSNHWV | 250 |
| | | TSNYAN | | | | | |
| CD3-125 | VH | TYAMN | 194 | RIRSKYNNYATYY | 223 | HGNFGDSYVS | 249 |
| | | | | ADSVKG | | WFAY | |
| | VL | GSSTGAVT | 204 | GTNKRAP | 215 | ALWYSNHWV | 250 |
| | | TSNYAN | | | | | |
| CD3-126 | VH | TYAMN | 194 | RIRSKYNNYATYY | 223 | HGNFGNSYVS | 238 |
| | | | | ADSVKG | | WFAY | |
| | VL | GSSTGAVT | 204 | GTNKRAP | 215 | ALWYSNHWV | 250 |
| | | TSNYAN | | | | | |
| CD3-127 | VH | TYAMN | 194 | RIRSKYNNYATYY | 223 | HGNFGNSYVS | 238 |
| | | | | ADSVKG | | WFAY | |
| | VL | GSSTGAVT | 204 | GTNKRAP | 215 | ALWYSNHWV | 250 |
| | | TSNYAN | | | | | |
| CD3-128 | VH | TYAMN | 194 | RIRSKYNNYATYY | 223 | HGNFGDSYVS | 249 |
| | | | | ADSVKG | | WFAY | |
| | VL | GSSTGAVT | 204 | GTNKRAP | 215 | ALWYSNHWV | 250 |
| | | TSNYAN | | | | | |
| CD3-129 | VH | TYAMN | 194 | RIRSKYNNYATYYA | 214 | HGNFGNSYVS | 260 |
| | | | | DSVKD | | WFAH | |
| | VL | GSSTGAVTS | 209 | GTNKRAP | 215 | ALWYSNLWV | 239 |
| | | SNYAN | | | | | |
| CD3-130 | VH | TYAMN | 194 | RIRSKYNNYATYYA | 214 | HGNFGNSYVS | 238 |
| | | | | DSVKD | | WFAY | |
| | VL | RSSTGAVTT | 195 | GTNKRAP | 215 | ALWYSNLWV | 239 |
| | | SNYAN | | | | | |

TABLE 12C
CD3 Binders-CDR sequences according to Chothia numbering scheme

| Binding | | | SEQ ID | | SEQ ID | | SEQ ID |
|---|---|---|---|---|---|---|---|
| Domain | Chain | CDR1 | NO: | CDR2 | NO: | CDR3 | NO: |
| CD3-1 | VH | GYTFTRY | 261 | NPSRGY | 274 | YYDDHYCLDY | 236 |
| | VL | SSSVSY | 262 | DTS | 275 | WSSNPF | 286 |
| CD3-2 | VH | GFTFNTY | 263 | RSKYNN | 276 | HGNFGNSYVS | 238 |
| | | | | YA | | WFAY | |
| | VL | STGAVTTSNY | 264 | GTN | 277 | WYSNLW | 287 |
| CD3-3 | VH | GYTFTSY | 265 | NPSSGY | 278 | WQDYDVYFDY | 240 |
| | VL | SSSVSY | 262 | ATS | 279 | WSSNPP | 288 |
| CD3-4 | VH | GYTFTRY | 261 | NPSRGY | 274 | YYDDHYCLDY | 236 |
| | VL | SSSVSY | 262 | DTS | 275 | WSSNPL | 289 |
| CD3-5 | VH | GYTFTRY | 261 | NPSRGY | 274 | YYDDHYCLDY | 236 |
| | VL | SSSVSY | 262 | DTS | 275 | WSSNPF | 286 |
| CD3-6 | VH | GFKFSGY | 266 | WYDGSK | 280 | QMGYWHFDL | 243 |
| | VL | SQSVSSY | 267 | DAS | 281 | RSNWPPL | 290 |
| CD3-7 | VH | GFTFSTY | 268 | RSKYNN | 282 | HGNFGNSYVS | 291 |
| | | | | YAT | | WFA | |
| | VL | STGAVTTSNY | 264 | GTN | 277 | WYSNLW | 287 |
| CD3-8 | VH | GYTFTRY | 26 | NPSRGY | 274 | YYDDHYCLDY | 236 |
| | VL | SSSVSY | 262 | DTS | 275 | WSSNPL | 289 |
| CD3-9 | VH | GFTFNTY | 263 | RSKYNN | 282 | HGNFGNSYVS | 291 |
| | | | | YAT | | WFA | |
| | VL | STGAVTTSNY | 264 | GTN | 277 | WYSNLW | 287 |
| CD3-10 | VH | GFTFNTY | 263 | RSKYNN | 276 | HGNFGNSYVS | 238 |
| | | | | YA | | WFAY | |
| | VL | STGAVTTSNY | 264 | GTN | 277 | WYSNLW | 287 |
| CD3-11 | VH | GFTFNSY | 269 | RSKYNN | 276 | HGNFGNSYVS | 246 |
| | | | | YA | | WWAY | |
| | VL | STGAVTSGNY | 270 | GTK | 283 | WYSNRW | 292 |
| CD3-12 | VH | GFTFNKY | 271 | RSKYNN | 276 | HGNFGNSYISY | 248 |
| | | | | YA | | WAY | |
| | VL | STGAVTSGNY | 270 | GTK | 283 | WYSNRW | 292 |
| CD3-13 | VH | GYTFTRY | 26 | NPSRGY | 274 | YYDDHYCLDY | 236 |
| | VL | SSSVSY | 262 | DTS | 275 | WSSNPF | 286 |
| CD3-14 | VH | GFTFSTY | 268 | RSKYNN | 276 | HGNFGNSYVS | 238 |
| | | | | YA | | WFAY | |
| | VL | STGAVTTSNY | 264 | GTN | 277 | WYSNLW | 287 |
| CD3-15 | VH | GFTFNTY | 263 | RSKYNN | 276 | HGNFGNSYVS | 238 |
| | | | | YA | | WFAY | |
| | VL | STGAVTTSNY | 264 | GTN | 277 | WYSNLW | 287 |
| CD3-16 | VH | GFTFNTY | 263 | RSKYNN | 276 | HGNFGNSYVS | 238 |
| | | | | YA | | WFAY | |
| | VL | STGAVTTSNY | 264 | GTN | 277 | WYSNLW | 287 |
| CD3-17 | VH | GFTFSTY | 268 | RSKYNN | 276 | HGNFGDSYVS | 249 |
| | | | | YA | | WFAY | |
| | VL | STGAVTTSNY | 264 | GTN | 277 | WYSNHW | 293 |
| CD3-18 | VH | GYTFTRY | 26 | NPSRGY | 274 | YYDDHYCLDY | 236 |
| | VL | SSSVSY | 262 | DTS | 275 | WSSNPF | 286 |
| CD3-19 | VH | GYTFTRY | 26 | NPSRGY | 274 | YYDDHYSLDY | 251 |
| | VL | SSSVSY | 262 | DTS | 275 | WSSNPF | 286 |
| CD3-20 | VH | GYSFTGY | 272 | NPYKGV | 284 | SGYYGDSDWY | 252 |
| | | | | | | FDV | |
| | VL | SQDIRNY | 273 | YTS | 285 | GNTLPW | 294 |
| CD3-21 | VH | GFTFNTY | 263 | RSKYNN | 276 | HGNFGNSYVS | 238 |
| | | | | YA | | WFAY | |
| | VL | RSSTGAVTTS | 195 | GTNKRA | 215 | ALWYSNLWV | 239 |
| | | NYAN | | P | | | |

TABLE 12D
CD3 Binders-CDR sequences according to combination of Kabat and Chothia
numbering schemes

| Binding | | | SEQ ID | | SEQ ID | | SEQ ID |
|---|---|---|---|---|---|---|---|
| Domain | Chain | CDR1 | NO: | CDR2 | NO: | CDR3 | NO: |
| CD3-1 | VH | GYTFTRYT | 295 | YINPSRGYTNYN | 212 | YYDDHYCLDY | 236 |
| | | MH | | QKFKD | | | |
| | VL | SASSSVSY | 193 | DTSKLAS | 213 | QQWSSNPFT | 237 |
| | | MN | | | | | |
| CD3-2 | VH | GFTFNTYA | 296 | RIRSKYNNYATYY | 214 | HGNFGNSYV | 238 |
| | | MN | | ADSVKD | | SWFAY | |
| | VL | RSSTGAVT | 195 | GTNKRAP | 215 | ALWYSNLWV | 239 |
| | | TSNYAN | | | | | |
| CD3-3 | VH | GYTFTSYT | 297 | YINPSSGYTKYN | 216 | WQDYDVYFD | 240 |
| | | MH | | QKFKD | | Y | |
| | VL | RASSSVSY | 197 | ATSNLAS | 217 | QQWSSNPPT | 241 |
| | | MH | | | | | |
| CD3-4 | VH | GYTFTRYT | 295 | YINPSRGYTNYN | 212 | YYDDHYCLDY | 236 |
| | | MH | | QKFKD | | | |
| | VL | RASSSVSY | 198 | DTSKVAS | 218 | QQWSSNPLT | 242 |
| | | MN | | | | | |
| CD3-5 | VH | GYTFTRYT | 295 | YINPSRGYTNYN | 219 | YYDDHYCLDY | 236 |
| | | MH | | QKVKD | | | |
| | VL | SASSSVSY | 193 | DTSKLAS | 213 | QQWSSNPFT | 237 |
| | | MN | | | | | |
| CD3-6 | VH | GFKFSGY | 298 | VIWYDGSKKYYV | 220 | QMGYWHFDL | 243 |
| | | GMH | | DSVKG | | | |
| | VL | RASQSVS | 200 | DASNRAT | 221 | QQRSNWPPL | 244 |
| | | SYLA | | | | T | |
| CD3-7 | VH | GFTFSTYA | 299 | RIRSKYNNYATYY | 303 | HGNFGNSYV | 238 |
| | | MN | | ADSVK | | SWFAY | |
| | VL | RSSTGAVT | 195 | GTNKRAP | 215 | ALWYSNLWV | 239 |
| | | TSNYAN | | | | | |
| CD3-8 | VH | GYTFTRYT | 295 | YINPSRGYTNYN | 212 | YYDDHYCLDY | 236 |
| | | MH | | QKFKD | | | |
| | VL | RASSSVSY | 198 | DTSKVAS | 218 | QQWSSNPLT | 242 |
| | | MN | | | | | |
| CD3-9 | VH | GFTFNTYA | 296 | RIRSKYNNYATYY | 303 | HGNFGNSYV | 238 |
| | | MN | | ADSVK | | SWFAY | |
| | VL | RSSTGAVT | 195 | GTNKRAP | 215 | ALWYSNLWV | 239 |
| | | TSNYAN | | | | | |
| CD3-10 | VH | GFTFNTYA | 296 | RIRSKYNNYATYY | 214 | HGNFGNSYV | 238 |
| | | MN | | ADSVKD | | SWFAY | |
| | VL | RSSTGAVT | 195 | GTNKRAP | 215 | ALWYSNLWV | 239 |
| | | TSNYAN | | | | | |
| CD3-11 | VH | GFTFNSYA | 300 | RIRSKYNNYATYY | 223 | HGNFGNSYV | 246 |
| | | MN | | ADSVKG | | SWWAY | |
| | VL | GSSTGAVT | 202 | GTKFLAP | 224 | VLWYSNRWV | 247 |
| | | SGNYPN | | | | | |
| CD3-12 | VH | GFTFNKYA | 301 | RIRSKYNNYATYY | 214 | HGNFGNSYIS | 248 |
| | | MN | | ADSVKD | | YWAY | |
| | VL | GSSTGAVT | 202 | GTKFLAP | 224 | VLWYSNRWV | 247 |
| | | SGNYPN | | | | | |
| CD3-13 | VH | GYTFTRYT | 295 | YINPSRGYTNYN | 212 | YYDDHYCLDY | 236 |
| | | MH | | QKFKD | | | |
| | VL | SASSSVSY | 193 | DTSKLAS | 213 | QQWSSNPFT | 237 |
| | | MN | | | | | |
| CD3-14 | VH | GFTFSTYA | 299 | RIRSKYNNYATYY | 214 | HGNFGNSYV | 238 |
| | | MN | | ADSVKD | | SWFAY | |
| | VL | RSSTGAVT | 195 | GTNKRAP | 215 | ALWYSNLWV | 239 |
| | | TSNYAN | | | | | |
| CD3-15 | VH | GFTFNTYA | 296 | RIRSKYNNYATYY | 214 | HGNFGNSYV | 238 |
| | | MN | | ADSVKD | | SWFAY | |
| | VL | RSSTGAVT | 195 | GTNKRAP | 215 | ALWYSNLWV | 239 |
| | | TSNYAN | | | | | |
| CD3-16 | VH | GFTFNTYA | 296 | RIRSKYNNYATYY | 223 | HGNFGNSYV | 238 |
| | | MN | | ADSVKG | | SWFAY | |
| | VL | GSSTGAVT | 204 | GTNKRAP | 215 | ALWYSNLWV | 239 |
| | | TSNYAN | | | | | |
| CD3-17 | VH | GFTFSTYA | 299 | RIRSKYNNYATYY | 223 | HGNFGDSYV | 249 |
| | | MN | | ADSVKG | | SWFAY | |
| | VL | GSSTGAVT | 204 | GTNKRAP | 215 | ALWYSNHWV | 250 |
| | | TSNYAN | | | | | |
| CD3-18 | VH | GYTFTRYT | 295 | YINPSRGYTNYN | 219 | YYDDHYCLDY | 236 |
| | | MH | | QKVKD | | | |
| | VL | SASSSVSY | 193 | DTSKLAS | 213 | QQWSSNPFT | 237 |
| | | MN | | | | | |
| CD3-19 | VH | GYTFTRYT | 295 | YINPSRGYTNYN | 219 | YYDDHYSLDY | 251 |
| | | MH | | QKVKD | | | |
| | VL | SASSSVSY | 193 | DTSKLAS | 213 | QQWSSNPFT | 237 |
| | | MN | | | | | |
| CD3-20 | VH | GYSFTGYT | 302 | LINPYKGVSTYNQ | 225 | SGYYGDSDW | 252 |
| | | MN | | KFKD | | YFDV | |
| | VL | RASQDIRN | 206 | YTSRLHS | 304 | QQGNTLPWT | 253 |
| | | YLN | | | | | |

[0568] In some embodiments, a MBM can comprise a CD3 ABM which comprises the CDRs of any of CD3-1 to CD3-130 as defined by Kabat numbering (e.g., as set forth in Table 12B). In other embodiments, a MBM can comprise a CD3 ABM which comprises the CDRs of any of CD3-1 to CD3-130 as defined by Chothia numbering (e.g., as set forth in Table 12C). In yet other embodiments, a MBM can comprise a CD3 ABM which comprises the CDRs of any of CD3-1 to CD3-130 as defined by a combination of Kabat and Chothia numbering (e.g., as set forth in Table 12D).

[0569] In some embodiments, a CD3 ABM comprises the CDR sequences of CD3-1. In some embodiments, a CD3 ABM comprises the CDR sequences of CD3-2. In some embodiments, a CD3 ABM comprises the CDR sequences of CD3-3. In some embodiments, a CD3 ABM comprises the CDR sequences of CD3-4. In some embodiments, a CD3 ABM comprises the CDR sequences of CD3-5. In some embodiments a CD3 ABM comprises the CDR sequences of CD3-6. In some embodiments, a CD3 ABM comprises the CDR sequences of CD3-7. In some embodiments, a CD3 ABM comprises the CDR sequences of CD3-8. In some embodiments, a CD3 ABM comprises the CDR sequences of CD3-9. In some embodiments, a CD3 ABM comprises the CDR sequences of CD3-10. In some embodiments, a CD3 ABM comprises the CDR sequences of CD3-11. In some embodiments, a CD3 ABM comprises the CDR sequences of CD3-12. In some embodiments, a CD3 ABM comprises the CDR sequences of CD3-13. In some embodiments, a CD3 ABM comprises the CDR sequences of CD3-14. In some embodiments, a CD3 ABM comprises the CDR sequences of CD3-15. In some embodiments, a CD3 ABM comprises the CDR sequences of CD3-16. In some embodiments, a CD3 ABM comprises the CDR sequences of CD3-17. In some embodiments, a CD3 ABM comprises the CDR sequences of CD3-18. In some embodiments, a CD3 ABM comprises the CDR sequences of CD3-19. In some embodiments, a CD3 ABM comprises the CDR sequences of CD3-20. In some embodiments, a CD3 ABM comprises the CDR sequences of CD3-21. In some embodiments, a CD3 ABM comprises the CDR sequences of CD3-22. In some embodiments, a CD3 ABM comprises the CDR sequences of CD3-23. In some embodiments, a CD3 ABM comprises the CDR sequences of CD3-24. In some embodiments, a CD3 ABM comprises the CDR sequences of CD3-25. In some embodiments, a CD3 ABM comprises the CDR sequences of CD3-26. In some embodiments, a CD3 ABM comprises the CDR sequences of CD3-27. In some embodiments, a CD3 ABM comprises the CDR sequences of CD3-28. In some embodiments, a CD3 ABM comprises the CDR sequences of CD3-29. In some embodiments, a CD3 ABM comprises the CDR sequences of CD3-30. In some embodiments, a CD3 ABM comprises the CDR sequences of CD3-31. In some embodiments, a CD3 ABM comprises the CDR sequences of CD3-32. In some embodiments, a CD3 ABM comprises the CDR sequences of CD3-33. In some embodiments, a CD3 ABM comprises the CDR sequences of CD3-34. In some embodiments, a CD3 ABM comprises the CDR sequences of CD3-35. In some embodiments, a CD3 ABM comprises the CDR sequences of CD3-36. In some embodiments, a CD3 ABM comprises the CDR sequences of CD3-37. In some embodiments, a CD3 ABM comprises the CDR sequences of CD3-38. In some embodiments, a CD3 ABM comprises the CDR sequences of CD3-39. In some embodiments, a CD3 ABM comprises the CDR sequences of CD3-40. In some embodiments, a CD3 ABM comprises the CDR sequences of CD3-41. In some embodiments, a CD3 ABM comprises the CDR sequences of CD3-42. In some embodiments, a CD3 ABM comprises the CDR sequences of CD3-43. In some embodiments, a CD3 ABM comprises the CDR sequences of CD3-44. In some embodiments, a CD3 ABM comprises the CDR sequences of CD3-45. In some embodiments, a CD3 ABM comprises the CDR sequences of CD3-46. In some embodiments, a CD3 ABM comprises the CDR sequences of CD3-47. In some embodiments, a CD3 ABM comprises the CDR sequences of CD3-48. In some embodiments, a CD3 ABM comprises the CDR sequences of CD3-49. In some embodiments, a CD3 ABM comprises the CDR sequences of CD3-50. In some embodiments, a CD3 ABM comprises the CDR sequences of CD3-51. In some embodiments, a CD3 ABM comprises the CDR sequences of CD3-52. In some embodiments, a CD3 ABM comprises the CDR sequences of CD3-53. In some embodiments, a CD3 ABM comprises the CDR sequences of CD3-54. In some embodiments, a CD3 ABM comprises the CDR sequences of CD3-55. In some embodiments, a CD3 ABM comprises the CDR sequences of CD3-56. In some embodiments, a CD3 ABM comprises the CDR sequences of CD3-57. In some embodiments, a CD3 ABM comprises the CDR sequences of CD3-58. In some embodiments, a CD3 ABM comprises the CDR sequences of CD3-59. In some embodiments, a CD3 ABM comprises the CDR sequences of CD3-60. In some embodiments, a CD3 ABM comprises the CDR sequences of CD3-61. In some embodiments, a CD3 ABM comprises the CDR sequences of CD3-62. In some embodiments, a CD3 ABM comprises the CDR sequences of CD3-63. In some embodiments, a CD3 ABM comprises the CDR sequences of CD3-64. In some embodiments, a CD3 ABM comprises the CDR sequences of CD3-65. In some embodiments, a CD3 ABM comprises the CDR sequences of CD3-66. In some embodiments, a CD3 ABM comprises the CDR sequences of CD3-67. In some embodiments, a CD3 ABM comprises the CDR sequences of CD3-68. In some embodiments, a CD3 ABM comprises the CDR sequences of CD3-69. In some embodiments, a CD3 ABM comprises the CDR sequences of CD3-70. In some embodiments, a CD3 ABM comprises the CDR sequences of CD3-71. In some embodiments, a CD3 ABM comprises the CDR sequences of CD3-72. In some embodiments, a CD3 ABM comprises the CDR sequences of CD3-73. In some embodiments, a CD3 ABM comprises the CDR sequences of CD3-74. In some embodiments, a CD3 ABM comprises the CDR sequences of CD3-75. In some embodiments, a CD3 ABM comprises the CDR sequences of CD3-76. In some embodiments, a CD3 ABM comprises the CDR sequences of CD3-77. In some embodiments, a CD3 ABM comprises the CDR sequences of CD3-78. In some embodiments, a CD3 ABM comprises the CDR sequences of CD3-79. In some embodiments, a CD3 ABM comprises the CDR sequences of CD3-80. In some embodiments, a CD3 ABM comprises the CDR sequences of CD3-81. In some embodiments, a CD3 ABM comprises the CDR sequences of CD3-82. In some embodiments, a CD3 ABM comprises the CDR sequences of CD3-83. In some embodiments, a CD3 ABM comprises the CDR sequences of CD3-84. In some embodiments, a CD3 ABM comprises the CDR sequences of CD3-85. In some embodiments, a CD3 ABM comprises the CDR sequences of CD3-86. In some embodiments, a CD3 ABM comprises the CDR sequences of CD3-87. In some embodiments, a CD3 ABM comprises the CDR sequences of CD3-88. In some embodiments, a CD3 ABM comprises the CDR sequences of CD3-89. In some embodiments, a CD3 ABM comprises the CDR sequences of CD3-90. In some embodiments, a CD3 ABM comprises the CDR sequences of CD3-91. In some embodiments, a CD3 ABM comprises the CDR sequences of CD3-92. In some embodiments, a CD3 ABM comprises the CDR sequences of CD3-93. In some embodiments, a CD3 ABM comprises the CDR sequences of CD3-94. In some embodiments, a CD3 ABM comprises the CDR sequences of CD3-95. In some embodiments, a CD3 ABM comprises the CDR sequences of CD3-96. In some embodiments, a CD3 ABM comprises the CDR sequences of CD3-97. In some embodiments, a CD3 ABM comprises the CDR sequences of CD3-98. In some embodiments, a CD3 ABM comprises the CDR sequences of CD3-99. In some embodiments, a CD3 ABM comprises the CDR sequences of CD3-100. In some embodiments, a CD3 ABM comprises the CDR sequences of CD3-101. In some embodiments, a CD3 ABM comprises the CDR sequences of CD3-102. In some embodiments, a CD3 ABM comprises the CDR sequences of CD3-103. In some embodiments, a CD3 ABM comprises the CDR sequences of CD3-104. In some embodiments, a CD3 ABM comprises the CDR sequences of CD3-105. In some embodiments, a CD3 ABM comprises the CDR sequences of CD3-106. In some embodiments, a CD3 ABM comprises the CDR sequences of CD3-107. In some embodiments, a CD3 ABM comprises the CDR sequences of CD3-108. In some embodiments, a CD3 ABM comprises the CDR sequences of CD3-109. In some embodiments, a CD3 ABM comprises the CDR sequences of CD3-110. In some embodiments, a CD3 ABM comprises the CDR sequences of CD3-111. In some embodiments, a CD3 ABM comprises the CDR sequences of CD3-112. In some embodiments, a CD3 ABM comprises the CDR sequences of CD3-113. In some embodiments, a CD3 ABM comprises the CDR sequences of CD3-114. In some embodiments, a CD3 ABM comprises the CDR sequences of CD3-115. In some embodiments, a CD3 ABM comprises the CDR sequences of CD3-116. In some embodiments, a CD3 ABM comprises the CDR sequences of CD3-117. In some embodiments, a CD3 ABM comprises the CDR sequences of CD3-118. In some embodiments, a CD3 ABM comprises the CDR sequences of CD3-119. In some embodiments, a CD3 ABM comprises the CDR sequences of CD3-120. In some embodiments, a CD3 ABM comprises the CDR sequences of CD3-121. In some embodiments, a CD3 ABM comprises the CDR sequences of CD3-122. In some embodiments, a CD3 ABM comprises the CDR sequences of CD3-123. In some embodiments, a CD3 ABM comprises the CDR sequences of CD3-124. In some embodiments, a CD3 ABM comprises the CDR sequences of CD3-125. In some embodiments, a CD3 ABM comprises the CDR sequences of CD3-126. In some embodiments, a CD3 ABM comprises the CDR sequences of CD3-127. In some embodiments, a CD3 ABM comprises the CDR sequences of CD3-126. In some embodiments, a CD3 ABM comprises the CDR sequences of CD3-127. In some embodiments, a CD3 ABM comprises the CDR sequences of CD3-128. In some embodiments, a CD3 ABM comprises the CDR sequences of CD3-129. In some embodiments, a CD3 ABM comprises the CDR sequences of CD3-130.

[0570] A MBM can comprise the complete heavy and light variable sequences of any of CD3-1 to CD3-130. In some embodiments, a MBM comprises a CD3 ABM which comprises the VH and VL sequences of CD3-1. In some embodiments, a MBM comprises a CD3 ABM which comprises the VH and VL sequences of CD3-1. In some embodiments, a MBM comprises a CD3 ABM which comprises the VH and VL sequences of CD3-2. In some embodiments, a MBM comprises a CD3 ABM which comprises the VH and VL sequences of CD3-3. In some embodiments, a MBM comprises a CD3 ABM which comprises the VH and VL sequences of CD3-4. In some embodiments, a MBM comprises a CD3 ABM which comprises the VH and VL sequences of CD3-5. In some embodiments, a MBM comprises a CD3 ABM which comprises the VH and VL sequences of CD3-6. In some embodiments, a MBM comprises a CD3 ABM which comprises the VH and VL sequences of CD3-7. In some embodiments, a MBM comprises a CD3 ABM which comprises the VH and VL sequences of CD3-8. In some embodiments, a MBM comprises a CD3 ABM which comprises the VH and VL sequences of CD3-9. In some embodiments, a MBM comprises a CD3 ABM which comprises the VH and VL sequences of CD3-10. In some embodiments, a MBM comprises a CD3 ABM which comprises the VH and VL sequences of CD3-11. In some embodiments, a MBM comprises a CD3 ABM which comprises the VH and VL sequences of CD3-12. In some embodiments, a MBM comprises a CD3 ABM which comprises the VH and VL sequences of CD3-13. In some embodiments, a MBM comprises a CD3 ABM which comprises the VH and VL sequences of CD3-14. In some embodiments, a MBM comprises a CD3 ABM which comprises the VH and VL sequences of CD3-15. In some embodiments, a MBM comprises a CD3 ABM which comprises the VH and VL sequences of CD3-16. In some embodiments, a MBM comprises a CD3 ABM which comprises the VH and VL sequences of CD3-17. In some embodiments, a MBM comprises a CD3 ABM which comprises the VH and VL sequences of CD3-18. In some embodiments, a MBM comprises a CD3 ABM which comprises the VH and VL sequences of CD3-19. In some embodiments, a MBM comprises a CD3 ABM which comprises the VH and VL sequences of CD3-20. In some embodiments, a MBM comprises a CD3 ABM which comprises the VH and VL sequences of CD3-21. In some embodiments, a MBM comprises a CD3 ABM which comprises the VH and VL sequences of CD3-22. In some embodiments, a MBM comprises a CD3 ABM which comprises the VH and VL sequences of CD3-23. In some embodiments, a MBM comprises a CD3 ABM which comprises the VH and VL sequences of CD3-24. In some embodiments, a MBM comprises a CD3 ABM which comprises the VH and VL sequences of CD3-25. In some embodiments, a MBM comprises a CD3 ABM which comprises the VH and VL sequences of CD3-26. In some embodiments, a MBM comprises a CD3 ABM which comprises the VH and VL sequences of CD3-27. In some embodiments, a MBM comprises a CD3 ABM which comprises the VH and VL sequences of CD3-28. In some embodiments, a MBM comprises a CD3 ABM which comprises the VH and VL sequences of CD3-129. In some embodiments, a MBM comprises a CD3 ABM which comprises the VH and VL sequences of CD3-130.

[0571] In addition to the CDR sets described in Tables 12B-12D (i.e., the set of six CDRs for each of CD3-1 to CD3-130), the present disclosure provides variant CDR sets. In one embodiment, a set of 6 CDRs can have 1, 2, 3, 4 or 5 amino acid changes from a CDR set described in Tables 12B-12D, as long as the CD3 ABM is still able to bind to the target antigen, as measured by at least one of a Biacore, surface plasmon resonance (SPR) and/or BLI (biolayer interferometry, e.g., Octet assay) assay.

[0572] In addition to the variable heavy and variable light domains disclosed in Table 12A that form an ABM to CD3, the present disclosure provides variant VH and VL domains. In one embodiment, the variant VH and VL domains each can have from 1, 2, 3, 4, 5, 6, 7, 8, 9 or 10 amino acid changes from the VH and VL domain set forth in Table 12A, as long as the ABM is still able to bind to the target antigen, as measured at least one of a Biacore, surface plasmon resonance (SPR) and/or BLI (biolayer interferometry, e.g., Octet assay) assay. In another embodiment, the variant VH and VL are at least 90, 95, 97, 98 or 99% identical to the respective VH or VL disclosed in Table 12A, as long as the ABM is still able to bind to the target antigen, as measured by at least one of a Biacore, surface plasmon resonance (SPR) and/or BLI (biolayer interferometry, e.g., Octet assay) assay.

[0573] In some embodiments, a MBM can comprise an ABM which is a CD3 binding molecule as described in WO 2020/052692 or an antigen-binding domain thereof.

[0574] VH and VL sequences (amino acid sequences and the nucleotide sequences encoding the amino acid sequences) can be “mixed and matched” to create other CD3ABMs. Such “mixed and matched” CD3 ABMs can be tested using binding assays known in the art (e.g., FACS assays). When chains are mixed and matched, a VH sequence from a particular VH/VL paring should be replaced with a structurally similar VH sequence. A VL sequence from a particular VH/VL pairing should be replaced with a structurally similar VL sequence.

[0575] In some embodiments, the antigen-binding domain that specifically binds to human CD3 is non-immunoglobulin based and is instead derived from a non-antibody scaffold protein, for example one of the non-antibody scaffold proteins described in Section 7.3.2. In an embodiment, the antigen-binding domain that specifically binds to human CD3 comprises Affilin-144160, which is described in WO 2017/013136. Affilin-144160 has the following amino acid sequence:

(SEQ ID NO: 305)
MQIFVKTLTGKTITLEVEPSDTIENVKAKIQDKEGIPPDQQWLWFAGKQ
LEDGRTLSDYNIQKESTLKLWLVDKAAMQIFVYTRTGKTITLEVEPSDT
IENVKAKIQDKEGIPPDQQRLIWAGKQLEDGRTLSDYNIALESGLHLVL
RLRAA

[0576] 7.7.2. TCR-α/β ABMs

[0577] The MBMs can contain an ABM that specifically binds to the TCR-a chain, the TCR-β chain, or the TCR-αβ dimer. Exemplary anti-TCR-α/β antibodies are known (see, e.g., US 2012/0034221; Borst et al., 1990, Hum Immunol. 29(3):175-88 (describing antibody BMA031)). The VH, VL, and Kabat CDR sequences of antibody BMA3 are provided in Table 13.

TABLE 13
BMA031 sequences

| | | SEQ |
|---|---|---|
| | | ID |
| Domain | Sequence | NO: |
| BMA031 | KASGYKFTSYVMH | 306 |
| CDR-H1 | | |
| BMA031 | YINPYNDVTKYNEKFK | 307 |
| CDR-H2 | | |
| BMA031 | GSYYDYDGFVY | 308 |
| CDR-H3 | | |
| BMA031 | SATSSVSYMH | 309 |
| CDR-L1 | | |
| BMA031 | DTSKLAS | 213 |
| CDR-L2 | | |
| BMA031 | QQWSSNPLT | 242 |
| CDR-L3 | | |
| BMA031 | EVQLQQSGPELVKPGASVKMSCKASGYKFTSYVMHWVKQKPGQGLE | 310 |
| VH | WIGYINPYNDVTKYNEKFKGKATLTSDKSSSTAYMELSSLTSEDSAVH | |
| | YCARGSYYDYDGFVYWGQGTLVTVSA | |
| BMA031 | QIVLTQSPAIMSASPGEKVTMTCSATSSVSYMHWYQQKSGTSPKRWI | 311 |
| VL | YDTSKLASGVPARFSGSGSGTSYSLTISSMEAEDAATYYCQQWSSNP | |
| | LTFGAGTKLELK | |

[0578] In an embodiment, a TCR ABM can comprise the CDR sequences of antibody BMA031. In other embodiments, a TCR ABM can comprise the VH and VL sequences of antibody BMA031.

[0579] 7.7.3. TCR-γ/δ ABMs

[0580] The MBMs can contain an ABM that specifically binds to the TCR-γ chain, the TCR-δ chain, or the TCR-γδ dimer. Exemplary anti-TCR-γ/δ antibodies are known (see, e.g., U.S. Pat. No. 5,980,892 (describing δTCS1, produced by the hybridoma deposited with the ATCC as accession number HB 9578)).

### 7.8. CD2 ABMs

[0581] 7.8.1. Immunoglobulin-Based CD2 ABMs

[0582] A Type TBM can comprise an ABM which is an anti-CD2 antibody or an antigen-binding domain thereof. Exemplary anti-CD2 antibodies are known (see, e.g., U.S. Pat. No. 6,849,258, CN102827281A, US 2003/0139579 A1, and U.S. Pat. No. 5,795,572). Table 14 provides exemplary CDR, VH, and VL sequences that can be included in anti-CD2 antibodies or antigen-binding fragments thereof, for use in MBMs of the disclosure.

TABLE 14
Immunoglobulin Based CD2 Binders

| | | | SEQ ID |
|---|---|---|---|
| Name | Domain | Sequence | NO: |
| CD2-1 | CDR-H1 | EYYMY (Rat Lo-CD2a = BTI-322 from FIG. 33 of U.S. Pat. | 312 |
| | | No. 6,849,258) | |
| CD2-1 | CDR-H2 | RIDPEDGSIDYVEKFKK (Rat Lo-CD2a = BTI-322 from FIG. | 313 |
| | | 33 of U.S. Pat. No. 6,849,258) | |
| CD2-1 | CDR-H3 | GKFNYRFAY (Rat Lo-CD2a = BTI-322 from FIG. 33 of U.S. | 314 |
| | | Pat. No. 6,849,258) | |
| CD2-1 | CDR-L1 | RSSQSLLHSSGNTYLN (Rat Lo-CD2a = BTI-322 from FIG. | 315 |
| | | 31 of U.S. Pat. No. 6,849,258) | |
| CD2-1 | CDR-L2 | LVSKLES (Rat Lo-CD2a = BTI-322 from FIG. 31 of U.S. | 316 |
| | | Pat. No. 6,849,258) | |
| CD2-1 | CDR-L3 | QFTHYPYT (Rat Lo-CD2a = BTI-322 from FIG. 31 of U.S. | 317 |
| | | Pat. No. 6,849,258) | |
| CD2-1 | VH | EVQLQQSGPELQRPGASVKLSCKASGYIFTEYYMYWVKQR | 318 |
| | | PKQGLELVGRIDPEDGSIDYVEKFKKKATLTADTSSNTAYM | |
| | | QLSSLTSEDTATYFCARGKFNYRFAYWGQGTLVTVSS | |
| | | (SEQ ID NO: 100 of U.S. Pat. No. 6,849,258) | |
| CD2-1 | VL | DVVLTQTPPTLLATIGQSVSISCRSSQSLLHSSGNTYLNWLL | 319 |
| | | QRTGQSPQPLIYLVSKLESGVPNRFSGSGSGTDFTLKISGV | |
| | | EAEDLGVYYCMQFTHYPYTFGAGTKLELK (Rat Lo-CD2a Vk | |
| | | from SEQ ID NO: 92, without signal sequence as shown in | |
| | | FIG. 31 of U.S. Pat. No. 6,849,258) | |
| hu1CD2-1 | VH | QVQLVQSGAEVKKPGASVKVSCKASGYTFTEYYMYWVRQ | 320 |
| | | APGQGLELMGRIDPEDGSIDYVEKFKKKVTLTADTSSSTAY | |
| | | MELSSLTSDDTAVYYCARGKFNYRFAYWGQGTLVTVSS | |
| | | (SEQ ID NO: 101 of U.S. Pat No. 6,849,258) | |
| | VL | DVVMTQSPPSLLVTLGQPASISCRSSQSLLHSSGNTYLNWL | 321 |
| | | LQRPGQSPQPLIYLVSKLESGVPDRFSGSGSGTDFTLKISG | |
| | | VEAEDVGVYYCMQFTHYPYTFGQGTKLEIK (SEQ ID NO: 96 | |
| | | of U.S. Pat. No. 6,849,258) | |
| hu2CD2-1 | VH | EVQLQQSGPELQRPGASVKLSCKASGYIFTEYYMYWVKQR | 318 |
| | | PKQGLELVGRIDPEDGSIDYVEKFKKKATLTADTSSNTAYM | |
| | | QLSSLTSEDTATYFCARGKFNYRFAYWGQGTLVTVSS (Vh | |
| | | of MEDI-507; SEQ ID NO: 105 of U.S. Pat. No. 6,849,258) | |
| | VL | DVVMTQSPPSLLVTLGQPASISCRSSQSLLHSSGNTYLNWL | 321 |
| | | LQRPGQSPQPLIYLVSKLESGVPDRFSGSGSGTDFTLKISG | |
| | | VEAEDVGVYYCMQFTHYPYTFGQGTKLEIK (SEQ ID NO: 96 | |
| | | of U.S. Pat. No. 6,849,258) (same as hu1CD2-1) | |

[0583] In some embodiments, a CD2 ABM comprises the CDR sequences of CD2-1 (SEQ ID NOS:312-317). In some embodiments, a CD2 ABM comprises the heavy and light chain variable sequences of CD2-1 (SEQ ID NOS: 318 and 319, respectively). In some embodiments, a CD2 ABM comprises the heavy and light chain variable sequences of hu1CD2-1 (SEQ ID NOS: 320 and 321, respectively). In some embodiments, a CD2 ABM comprises the heavy and light chain variable sequences of hu2CD2-1 (SEQ ID NOS: 318 and 321, respectively).

[0584] In other embodiments, a CD2 ABM can comprise the CDR sequences of antibody 9D1 produced by the hybridoma deposited with the Chinese Culture Collection Committee General Microbiology Center on May 16, 2012 with accession no. CGMCC 6132, and which is described in CN102827281A. In other embodiments, a CD2 ABM can comprise the CDR sequences of antibody LO-CD2b produced by the hybridoma deposited with the American Type Culture Collection on Jun. 22, 1999 with accession no. PTA-802, and which is described in US 2003/0139579 A1. In yet other embodiments, a CD2 ABM can comprise the CDR sequences of the CD2 SFv-Ig produced by expression of the construct cloned in the recombinant E. coli deposited with the ATCC on Apr. 9, 1993 with accession no. 69277, and which is described in U.S. Pat. No. 5,795,572.

[0585] In other embodiments, a CD2 ABM can comprise the VH and VL sequences of antibody 9D1. In other embodiments, a CD2 ABM can comprise the VH and VL sequences of antibody LO-CD2b. In yet other embodiments, a CD2 ABM can comprise the VH and VL sequences of the CD2 SFv-Ig produced by expression of the construct cloned in the recombinant E. coli having ATCC accession no. 69277.

[0586] 7.8.2. CD58-based CD2 ABMs

[0587] In certain aspects the present disclosure provides a Type 1 TBM comprising a CD2 ABM which is a ligand. The CD2 ABM specifically binds to human CD2, whose natural ligand is CD58, also known as LFA-3. CD58/LFA-3 proteins are glycoproteins that are expressed on the surfaces of a variety of cell types (Dustin et al., 1991, Annu. Rev. Immunol. 9:27) and play roles in mediating T-cell interactions with APCs in both antigen-dependent and antigen-independent manners (Wallner et al., 1987, J. Exp. Med. 166:923). Accordingly, in certain aspects, the CD2 ABM is a CD58 moiety. As used herein, a CD58 moiety comprises an amino acid sequence comprising at least 70% sequence identity to a CD2-binding portion of CD58, e.g., at least 70%, 71%, 72%, 73%, 74%, 75%, 76%, 77%, 78%, 79%, 80%,81%, 82%, 83%, 84%, 85%, 86%, 87%, 88%, 89%, 90%, 91%, 92%, 93%, 94%, 95%, 96%, 97%, 98%, or 99% identity to a CD2-binding portion of CD58. The sequence of human CD58 has the Uniprot identifier P19256 (www.uniprot.org/uniprot/P19256). It has been established that CD58 fragments containing amino acid residues 30-123 of full length CD58 (i.e., the sequence designated as CD58-6 in Table 15 below) are sufficient for binding to CD2. Wang et al., 1999, Cell 97:791-803. Accordingly, in certain aspects, a CD58 moiety comprises an amino acid sequence comprising at least 70% sequence identity to amino acids 30-123 of CD58, e.g., at least 70%, 71%, 72%, 73%, 74%, 75%, 76%, 77%, 78%, 79%, 80%,81%, 82%, 83%, 84%, 85%, 86%, 87%, 88%, 89%, 90%, 91%, 92%, 93%, 94%, 95%, 96%, 97%, 98%, or 99% identity to the amino acid sequence designated CD58-6.

[0588] The interactions between CD58 and CD2 have been mapped through x-ray crystallography and molecular modeling. The substitution of residues E25, K29, K30, K32, D33, K34, E37, D84 and K87 (with numbering referring to the in the mature polypeptide) reduces binding to CD2. Ikemizu et al., 1999, Proc. Natl. Acad. Sci. USA 96:4289-94. Accordingly, in some embodiments the CD58 moiety retains the wild type residues at E25, K29, K30, K32, D33, K34, E37, D84 and K87.

[0589] In contrast, the following substitutions (with numbering referring to the full length polypeptide) did not impact binding to CD2: F29S; V37K; V49Q; V86K; T113S; and L121G. Accordingly, a CD58 moiety can include one, two, three, four, five or all six of the foregoing substitutions.

[0590] In some embodiments, the CD58 moiety is engineered to include a pair of cysteine substitutions that upon recombinant expression create a disulfide bridge. Exemplary amino aid pairs that can be substituted with cysteines in order to form a disulfide bridge upon expression (with numbering referring to the full length polypeptide) are (a) a V45C substitution and a M105C substitution; (b) a V54C substitution and a G88C substitution; (c) a V45C substitution and a M 114C substitution; and (d) a W56C substitution and a L90C substitution.

[0591] Exemplary CD58 moieties are provided in Table 15 below:

TABLE 15
CD58 sequences

| Name | Description | Sequence | SEQ ID NO: |
|---|---|---|---|
| CD58-1 | Full length CD58, | MVAGSDAGRALGVLSVVCLLHCFGFISCFSQQIYGVVY | 322 |
| | including signal | GNVTFHVPSNVPLKEVLWKKQKDKVAELENSEFRAFS | |
| | sequence and full | SFKNRVYLDTVSGSLTIYNLTSSDEDEYEMESPNITDTM | |
| | intracellular domain | KFFLYVLESLPSPTLTCALTNGSIEVQCMIPEHYNSHRG | |
| | (P19256) | LIMYSWDCPMEQCKRNSTSIYFKMENDLPQKIQCTLSN | |
| | | PLFNTTSSIILTTCIPSSGHSRHRYALIPIPLAVITTCIVLY | |
| | | MNGILKCDRKPDRTNSN | |
| CD58-2 | Full length CD58, | MVAGSDAGRALGVLSVVCLLHCFGFISCFSQQIYGVVY | 323 |
| | including signal | GNVTFHVPSNVPLKEVLWKKQKDKVAELENSEFRAFS | |
| | sequence and but | SFKNRVYLDTVSGSLTIYNLTSSDEDEYEMESPNITDTM | |
| | no intracellular | KFFLYVLESLPSPTLTCALTNGSIEVQCMIPEHYNSHRG | |
| | domain (P19256-2) | LIMYSWDCPMEQCKRNSTSIYFKMENDLPQKIQCTLSN | |
| | | PLFNTTSSIILTTCIPSSGHSRHRYALIPIPLAVITTCIVLY | |
| | | MNVL | |
| CD58-3 | Full length CD58, | MVAGSDAGRALGVLSVVCLLHCFGFISCFSQQIYGVVY | 324 |
| | including signal | GNVTFHVPSNVPLKEVLWKKQKDKVAELENSEFRAFS | |
| | sequence and | SFKNRVYLDTVSGSLTIYNLTSSDEDEYEMESPNITDTM | |
| | variant intracellular | KFFLYVLESLPSPTLTCALTNGSIEVQCMIPEHYNSHRG | |
| | domain (P19256-3) | LIMYSWDCPMEQCKRNSTSIYFKMENDLPQKIQCTLSN | |
| | | PLFNTTSSIILTTCIPSSGHSRHRYALIPIPLAVITTCIVLY | |
| | | MNGILKCDRKPDRTK | |
| CD58-4 | Extracellular domain | FSQQIYGVVYGNVTFHVPSNVPLKEVLWKKQKDKVAE | 325 |
| | of CD58, | LENSEFRAFSSFKNRVYLDTVSGSLTIYNLTSSDEDEYE | |
| | corresponding to | MESPNITDTMKFFLYVLESLPSPTLTCALTNGSIEVQCM | |
| | amino acids 29-215 | IPEHYNSHRGLIMYSWDCPMEQCKRNSTSIYFKMENDL | |
| | of CD58 (WT) | PQKIQCTLSNPLFNTTSSIILTTCIPSSGHSRHR | |
| CD58-5 | Extracellular domain | BSQQIYGVJYGNVTFHVPSNOPLKEVLWKKQKDK | 326 |
| | of CD58, | VAELENSEFRAFSSFKNRVYLDTUSGSLTIYNLTS | |
| | corresponding to | SDEDEYEMESPNITDXMKFFLYVZESLPSPTLTCA | |
| | amino acids 29-215 | LTNGSIEVQCMIPEHYNSHRGLIMYSWDCPMEQC | |
| | of CD58 (with | KRNSTSIYFKMENDLPQKIQCTLSNPLFNTTSSIILT | |
| | permitted | TCIPSSGHSRHR | |
| | substitutions) | B = F or S | |
| | | J = V or K | |
| | | O = V or Q | |
| | | U = V or K | |
| | | X = T or S | |
| | | Z = L or G | |
| CD58-6 | Amino acids 30-123 | SQQIYGVVYGNVTFHVPSNVPLKEVLWKKQKDKVAEL | 327 |
| | (WT) | ENSEFRAFSSFKNRVYLDTVSGSLTIYNLTSSDEDEYE | |
| | Ig-V like domain | MESPNITDTMKFFLYVLES | |
| CD58-7 | Amino acids 30-123 | SQQIYGVJYGNVTFHVPSNOPLKEVLWKKQKDKVAEL | 328 |
| | (with permitted | ENSEFRAFSSFKNRVYLDTVSGSLTIYNLTSSDEDEYE | |
| | substitutions) | MESPNITDTMKFFLYVLES | |
| | Ig-V like domain | J = V or K | |
| | | O = V or Q | |
| CD58-8 | Amino acids 30-123 | SQQIYGWVYGNVTFHCPSNVPLKEVLWKKQKDKVAEL | 329 |
| | (V45C_M105C) | ENSEFRAFSSFKNRVYLDTVSGSLTIYNLTSSDEDEYE | |
| | Ig-V like domain | CESPNITDTMKFFLYVLES | |
| CD58-9 | Amino acids 30-123 | SQQIYGVVYGNVTFHVPSNVPLKECLWKKQKDKVAEL | 330 |
| | (V54C_G88C) | ENSEFRAFSSFKNRVYLDTVSCSLTIYNLTSSDEDEYE | |
| | Ig-V like domain | MESPNITDTMKFFLYVLES | |
| CD58-10 | Amino acids 30-123 | SQQIYGWVYGNVTFHCPSNVPLKEVLWKKQKDKVAEL | 331 |
| | (V45C_M114C) | ENSEFRAFSSFKNRVYLDTVSGSLTIYNLTSSDEDEYE | |
| | Ig-V like domain | MESPNITDTCKFFLYVLES | |
| CD58-11 | Amino acids 30-123 | SQQIYGWYGNVTFHVPSNVPLKEVLCKKQKDKVAELE | 332 |
| | (W56C_L90C) | NSEFRAFSSFKNRVYLDTVSGSCTIYNLTSSDEDEYEM | |
| | Ig-V like domain | ESPNITDTMKFFLYVLES | |

[0592] 7.8.3. CD48-Based CD2 ABMs

[0593] In certain aspects the present disclosure provides a MBM comprising a CD2 ABM which is CD48 moiety. As used herein, a CD48 moiety comprises an amino acid sequence comprising at least 70% sequence identity to a CD2-binding portion of CD48, e.g., at least 70%, 71%, 72%, 73%, 74%, 75%, 76%, 77%, 78%, 79%, 80%,81%, 82%, 83%, 84%, 85%, 86%, 87%, 88%, 89%, 90%, 91%, 92%, 93%, 94%, 95%, 96%, 97%, 98%, or 99% identity to a CD2-binding portion of CD48. The sequence of human CD48 has the Uniprot identifier P09326 (www.uniprot.org/uniprot/P09326), which includes a signal peptide (amino acids 1-26) and a GPI anchor (amino acids 221-243). In certain aspects, a CD48 moiety comprises an amino acid sequence comprising at least 70% sequence identity (e.g., at least 70%, 71%, 72%, 73%, 74%, 75%, 76%, 77%, 78%, 79%, 80%,81%, 82%, 83%, 84%, 85%, 86%, 87%, 88%, 89%, 90%, 91%, 92%, 93%, 94%, 95%, 96%, 97%, 98%, or 99% identity) to the amino acid sequence consisting of amino acids 27-220 of Uniprot identifier P09326. Human CD48 has an Ig-like C2-type I domain (amino acids 29-127 of Uniprot identifier P09326) and a Ig-like C2 type 2 domain (amino acids 132-212 of Uniprot identifier P09326). Accordingly, in some embodiments, a CD48 moiety comprises an amino acid sequence comprising at least 70% sequence identity (e.g., at least 70%, 71%, 72%, 73%, 74%, 75%, 76%, 77%, 78%, 79%, 80%,81%, 82%, 83%, 84%, 85%, 86%, 87%, 88%, 89%, 90%, 91%, 92%, 93%, 94%, 95%, 96%, 97%, 98%, or 99% identity) to the amino acid sequence consisting of amino acids 29-212 of Uniprot identifier P09326, to the C2-type I domain (amino acids 29-127 of Uniprot identifier P09326) and/or to the Ig-like C2 type 2 domain (amino acids 132-212 of Uniprot identifier P09326). A CD48 moiety can in some embodiments comprise one or more natural variants relative to the sequence of Uniprot identifier P09326. For example, a CD48 moiety can include a E102Q substitution. As another example, a CD48 moiety can comprise an amino acid sequence corresponding to a CD-48 isoform or a CD2 binding portion thereof, e.g., the isoform having Uniprot identifier P09326-2 or a CD2 binding portion thereof.

### 7.9. Tumor-Associated Antigen ABMs

[0594] The Type 2 TBMs can comprise an ABM that binds specifically to a tumor-associated antigen (TAA). In some embodiments, the TAA is a human TAA. The antigen may or may not be present on normal cells. In certain embodiments, the TAA is preferentially expressed or upregulated on tumor cells as compared to normal cells. In other embodiments, the TAA is a lineage marker.

[0595] In certain embodiments, the TAA is expressed or upregulated on cancerous B cells as compared to normal B cells. In other embodiments, the TAA is a B cell lineage marker.

[0596] It is anticipated that any type of B cell malignancy can be targeted by the MBMs of the disclosure. Exemplary types of B cell malignancies that can be targeted include Hodgkin's lymphomas, non-Hodgkin's lymphomas (NHLs), and multiple myeloma. Examples of NHLs include diffuse large B-cell lymphoma (DLBCL), follicular lymphoma, chronic lymphocytic leukemia (CLL)/small lymphocytic lymphoma (SLL), mantie cell lymphoma (MCL), marginal zone lymphomas, Burkitt lymphoma, lymphoplasmacytic lymphoma (Waldenstrom macroglobulinemia), hairy cell leukemia, primary central nervous system (CNS) lymphoma, primary mediastinal large B-cell lymphoma, mediastinal grey-zone lymphoma (MGZL), splenic marginal zone B-cell lymphoma, extranodal marginal zone B-cell lymphoma of MALT, nodal marginal zone B-cell lymphoma, and primary effusion lymphoma.

[0597] Examples of TAAs other than CD19 that can be targeted by the MBMs (e.g., TBMs) include BCMA, CD20, CD22, CD123, CD33, CLL1, CD138 (also known as Syndecan-1, SDC1), CS1, CD38, CD133, FLT3, CD52, TNFRSF13C (TNF Receptor Superfamily Member 13C, also referred to in the art as BAFFR: B-Cell-Activating Factor Receptor), TNFRSF13B (TNF Receptor Superfamily Member 13B, also referred to in the art as TACI: Transmembrane Activator And CAML Interactor), CXCR4 (C-X-C Motif Chemokine Receptor 4), PD-L1 (programmed death-ligand 1), LY9 (lymphocyte antigen 9, also referred to in the art as CD229), CD200, FCGR2B (Fc fragment of IgG receptor IIb, also referred to in the art as CD32b), CD21, CD23, CD24, CD40L, CD72, CD79a, and CD79b. In some embodiments, the TAA is BCMA. In some embodiments, the TAA is CD20. In some embodiments, the TAA is CD22. In some embodiments, the TAA is CD123. In some embodiments, the TAA is CD33. In some embodiments, the TAA is CLL1. In some embodiments, the TAA is CD138. In some embodiments, the TAA is CS1. In some embodiments, the TAA is CD38. In some embodiments, the TAA is CD133. In some embodiments, the TAA is FLT3. In some embodiments, the TAA is CD52. In some embodiments, the TAA is TNFRSF13C. In some embodiments, the TAA is TNFRSF13B. In some embodiments, the TAA is CXCR4. In some embodiments, the TAA is PD-L1. In some embodiments, the TAA is LY9. In some embodiments, the TAA is CD200. In some embodiments, the TAA is CD21. In some embodiments, the TAA is CD23. In some embodiments, the TAA is CD24. In some embodiments, the TAA is CD40L. In some embodiments, the TAA is CD72. In some embodiments, the TAA is CD79a. In some embodiments, the TAA is CD79b.

[0598] A TAA-binding ABM can comprise, for example, an anti-TAA antibody or an antigen-binding fragment thereof. The anti-TAA antibody or antigen-binding fragment can comprise, for example, the CDR sequences of an antibody set forth in Table 16. In some embodiments, the anti-TAA antibody or antigen-binding domain thereof has the heavy and light chain variable region sequences of an antibody set forth in Table 16.

TABLE 16
Exemplary Anti-Tumor-Associated Antigen Antibodies

| Target | Examples of Antibody Name and/or Reference(s) and/or Source |
|---|---|
| CD123 | Any CD123 antibody described in U.S. Pat. No. 8,852,551, EP2426148, WO |
| | 2014/138819, WO 2016/028896, or WO 2014/130635 |
| BCMA | Any BCMA antibody described in WO2012163805, WO200112812, or |
| | WO2003062401. |
| CD20 | Rituximab, Ofatumumab, Ocrelizumab, Veltuzumab, or GA 101 |
| CD22 | Any CD22 antibody described in Haso et al., 2013, Blood, 121(7): 1165-1174, |
| | Wayne et al., 2010, Clin Cancer Res 16(6): 1894-1903, Kato et al., 2013, Leuk |
| | Res 37(1): 83-88, or Creative BioMart (creativebiomart.net): MOM-18047-S(P). |
| CD33 | Any CD33 antibody described in Bross et al., 2001, Clin Cancer Res 7(6): 1490- |
| | 1496 (Gemtuzumab Ozogamicin, hP67.6), Caron et al., 1992, Cancer Res |
| | 52(24): 6761-6767 (Lintuzumab, HuM195), Lapusan et al., 2012, Invest New |
| | Drugs 30(3): 1121-1131 (AVE9633), Aigner et al., 2013, Leukemia 27(5): 1107- |
| | 1115 (AMG330, CD33 BITE), Dutour et al., 2012, Adv Hematol 2012: 683065, or |
| | Pizzitola et al., 2014, Leukemia doi:10.1038/Lue.2014.62. |
| CD38 | Daratumumab (see, e.g., Groen et al., 2010, Blood 116(21): 1261-1262; MOR202 |
| | (see, e.g., U.S. Pat. No. 8,263,746); or any CD38 antibody described in U.S. Pat. |
| | No. 8,362,211. |
| CLL-1 | PE-CLL1-hu Cat# 353604 (BioLegend); PE-CLL1 (CLEC12A) Cat# 562566 |
| | (BD); Any CLL-1 antibody described in WO 2014/051433 A1, US 2016/0368994 |
| | A1, US 2013/0295118 A1, U.S. Pat. No. 8,536,310 B2, Lu et al., 2014, |
| | Angewandte Chemie International Edition 53(37): 9841-9845, or Leong et al., |
| | 2017, Blood 129(5): 609-618 |
| CS1 | Elotuzumab (BMS), see e.g., Tai et al., 2008, Blood 112(4): 1329-37; Tai et al., |
| | 2007, Blood. 110(5): 1656-63. |
| FLT3 | Any FLT3 antibody described in WO 2011/076922, U.S. Pat. No. 5,777,084, |
| | EP0754230, or US 2009/0297529. |
| CD133 | Any CD133 antibody described in U.S. Pat No. 9,624,303, WO 2016/154623, or |
| | WO 2011/089211; 5E3 (ThermoFisher); MAB11331 (R&D Systems); MAB4310 |
| | (Millipore Sigma) |
| CD138 | Any CD138 antibody described in WO/2009/080829, WO/2017/014679, or U.S. |
| | Pat. No. 9,289,509; nBT062 (Biotest AG); MI15, B-A38, SP152, DL-101 |
| | (ThermoFisher) |
| CD52 | alemtuzumab (Genzyme); ANT1034 (see, Holgate et al., 2015, PLOS ONE |
| | 10(9): e0138123; any CD52 antibody described in WO/2010/132659; any CD52 |
| | antibody described in U.S. Pat No. 9,708,407; any CD52 antibody described in |
| | WO/2010/132659 |
| TNFRSF13C | Any TNFRSF13C antibody described in WO 2010/007082, U.S. Pat. No. |
| | 9,382,326 |
| TNFRSF13B | Any TNFRSF13B antibody described in WO 2004/011611; LS-C89973 (Lifespan |
| | Biosciences, Inc.) M02952-1 (Boster Biological Technology); MAB1041, |
| | MAB1741, and MAB174 (R&D Systems) |
| CXCR4 | Any CXCR4 antibody described in U.S. Pat. Nos. 7,138,496, 8,329,178, |
| | 8,450,464, 9,249,223, or 9,260,527 |
| PD-L1 | Any PD-L1 antibody described in US 2015/0203580, US 2017/0058033, US |
| | 2017/0204184, U.S. Pat. No. 8,741,295, U.S. Pat. No. 9,789,183, or U.S. Pat. No. |
| | 9,637,546 |
| LY9 | HLy9.25 (e.g., Lifespan Biosciences, Inc. cat. no. LS-C112605); MAB1898 (R&D |
| | Systems) |
| CD200 | Any CD200 antibody described in U.S. Pat. No. 7,887,798; ab23552 (Abcam); |
| | Ox104 (ThermoFisher) |
| FCGR2B | Any FCGR2B antibody described in U.S. Pat No. 8,802,089 or WO 2017/103895; |
| | ab45143 (Abcam); AT130-2 (ThermoFisher); 2E10 (Millipore Sigma) |
| CD21 | ab75985 (Abcam); ab9492 (Abcam); 2G9 (ThermoFisher); HB5 (ThermoFisher); |
| | MAB4909 (R&D Systems) |
| CD23 | Any CD23 antibody described in U.S. Pat. No. 7,008,623 or U.S. Pat. No. |
| | 6,011,138; lumiliximab (Biogen); ab16702 (Abcam); SP23 (ThermoFisher) |
| CD24 | Any CD24 antibody described in U.S. Pat. No. 8,614,301; SN3 (ThermoFisher); |
| | SN3b (ThermoFisher); 2Q1282 (Santa Cruz Biotechnology); 3H1143 (Santa |
| | Cruz Biotechnology); ALB9 (Santa Cruz Biotechnology); MAB5248 (R&D |
| | Systems) |
| CD40L | Any CD40L antibody described in U.S. Pat. No. 9,228,018 or US 2003/0099642; |
| | 24-31 (Biolegend); ab52750 (Abcam); ab47204 (Abcam); CDP7657 (UCB |
| | Pharma); 5c8 (Biogen) |
| CD72 | 3F3 (Biolegend); Bu40 (ThermoFisher); H-7 (Santa Cruz Biotechnology); H-96 |
| | (Santa Cruz Biotechnology); G-5 (Santa Cruz Biotechnology); ab92509 (Abcam) |
| CD79a | ab62650 (Abcam); ab79414 (Abcam); MAB69201 (R&D Systems); HM57 (Bio- |
| | Rad) |
| CD79b | Any CD79b antibody described in WO 2014/011521; ab130422 (Abcam); |
| | ab134147 (Abcam); polatuzumab (Genentech) |

[0599] In certain embodiments, the TMA is selected from BCMA and CD20. In some embodiments, the TMA is BCMA. “BCMA” refers to B-cell maturation antigen. BCMA (also known as TNFRSF17, BCM or CD269) is a member of the tumor necrosis receptor (TNFR) family and is predominantly expressed on terminally differentiated B cells, e.g., memory B cells and plasma cells. Its ligands include B-cell activating factor (BAFF) and a proliferation-inducing ligand (APRIL). The protein BCMA is encoded by the gene TNFRSF17. Exemplary BCMA sequences are available at the Uniprot database under accession number Q02223.

[0600] In certain aspects, a Type 2 TBM comprises an ABM3 that specifically binds to BCMA, for example, an anti-BCMA antibody or an antigen-binding domain thereof. The anti-BCMA antibody or antigen-binding domain thereof can comprise, for example, CDR, VH, VL, or scFV sequences set forth in Tables 17A-17G.

TABLE 17A
BCMA Binders-Variable domain and scFv sequences

| | | | SEQ |
|---|---|---|---|
| | | | ID |
| Antibody | Domain | Sequence | NO. |
| BCMA-1 | VH | EVQLVESGGGLVQPGGSLRLSCAVSGFALSNHGMSWVRRAPG | 333 |
| | | KGLEWVSGIVYSGSTYYAASVKGRFTISRDNSRNTLYLQMNSLR | |
| | | PEDTAIYYCSAHGGESDVWGQGTTVTVSS | |
| | VL | DIQLTQSPSSLSASVGDRVTITCRASQSISSYLNWYQQKPGKAPK | 334 |
| | | LLIYAASSLQSGVPSRFSGSGSGTDFTLTISSLQPEDFATYYCQQ | |
| | | SYSTPYTFGQGTKVEIK | |
| | scFv | EVQLVESGGGLVQPGGSLRLSCAVSGFALSNHGMSWVRRAPG | 335 |
| | | KGLEWSGIVYSGSTYYAASVKGRFTISRDNSRNTLYLQMNSLR | |
| | | PEDTAIYYCSAHGGESDVWGQGTTVTVSSASGGGGSGGRASG | |
| | | GGGSDIQLTQSPSSLSASVGDRVTITCRASQSISSYLNWYQQKP | |
| | | GKAPKLLIYAASSLQSGVPSRFSGSGSGTDFTLTISSLQPEDFAT | |
| | | YYCQQSYSTPYTFGQGTKVEIK | |
| BCMA-2 | VH | QVQLVESGGGLVQPGRSLRLSCAASGFTFSNYAMSWVRQAPG | 336 |
| | | KGLGWVSGISRSGENTYYADSVKGRFTISRDNSKNTLYLQMNSL | |
| | | RDEDTAVYYCARSPAHYYGGMDVWGQGTTVTVSS | |
| | VL | DIVLTQSPGTLSLSPGERATLSCRASQSISSSFLAWYQQKPGQA | 337 |
| | | PRLLIYGASRRATGIPDRFSGSGSGTDFTLTISRLEPEDSAVYYC | |
| | | QQYHSSPSWTFGQGTKLEIK | |
| | scFv | QVQLVESGGGLVQPGRSLRLSCAASGFTFSNYAMSWVRQAPG | 338 |
| | | KGLGWVSGISRSGENTYYADSVKGRFTISRDNSKNTLYLQMNSL | |
| | | RDEDTAVYYCARSPAHYYGGMDVWGQGTTVTVSSASGGGGSG | |
| | | GRASGGGGSDIVLTQSPGTLSLSPGERATLSCRASQSISSSFLA | |
| | | WYQQKPGQAPRLLIYGASRRATGIPDRFSGSGSGTDFTLTISRLE | |
| | | PEDSAVYYCQQYHSSPSWTFGQGTKLEIK | |
| BCMA-3 | VH | QVQLVESGGGLVQPGRSLRLSCAASGFTFDDYAMHWVRQAPG | 339 |
| | | KGLEWVSGISWNSGSIGYADSVKGRFTISRDNAKNSLYLQMNSL | |
| | | RAEDTALYYCSVHSFLAYWGQGTLVTVSS | |
| | VL | DIVMTQTPLSLPVTPGEPASISCRSSQSLLHSNGYNYLDWYLQK | 340 |
| | | PGQSPQLLIYLGSNRASGVPDRFSGSGSGTDFTLKISRVEAEDV | |
| | | GVYYCMQALQTPYTFGQGTKVEIK | |
| | scFv | QVQLVESGGGLVQPGRSLRLSCAASGFTFDDYAMHWVRQAPG | 341 |
| | | KGLEWVSGISWNSGSIGYADSVKGRFTISRDNAKNSLYLQMNSL | |
| | | RAEDTALYYCSVHSFLAYWGQGTLVTVSSASGGGGSGGRASG | |
| | | GGGSDIVMTQTPLSLPVTPGEPASISCRSSQSLLHSNGYNYLDW | |
| | | YLQKPGQSPQLLIYLGSNRASGVPDRFSGSGSGTDFTLKISRVE | |
| | | AEDVGVYYCMQALQTPYTFGQGTKVEIK | |
| BCMA-4 | VH | EVQLLESGGGLVQPGGSLRLSCAVSGFALSNHGMSWVRRAPG | 342 |
| | | KGLEWVSGIVYSGSTYYAASVKGRFTISRDNSRNTLYLQMNSLR | |
| | | PEDTAIYYCSAHGGESDVWGQGTTVTVSS | |
| | VL | DIVMTQTPLSLSVTPGQPASISCKSSQSLLRNDGKTPLYWYLQKA | 343 |
| | | GQPPQLLIYEVSNRFSGVPDRFSGSGSGTDFTLKISRVEAEDVG | |
| | | AYYCMQNIQFPSFGGGTKLEIK | |
| | scFv | EVQLLESGGGLVQPGGSLRLSCAVSGFALSNHGMSWVRRAPG | 344 |
| | | KGLEWVSGIVYSGSTYYAASVKGRFTISRDNSRNTLYLQMNSLR | |
| | | PEDTAIYYCSAHGGESDVWGQGTTVTVSSASGGGGSGGRASG | |
| | | GGGSDIVMTQTPLSLSVTPGQPASISCKSSQSLLRNDGKTPLYW | |
| | | YLQKAGQPPQLLIYEVSNRFSGVPDRFSGSGSGTDFTLKISRVEA | |
| | | EDVGAYYCMQNIQFPSFGGGTKLEIK | |
| BCMA-5 | VH | QVQLVQSGAEVRKTGASVKVSCKASGYIFDNFGINWVRQAPGQ | 345 |
| | | GLEWMGWINPKNNNTNYAQKFQGRVTITADESTNTAYMEVSSL | |
| | | RSEDTAVYYCARGPYYYQSYMDVWGQGTMVTVSS | |
| | VL | DIVMTQTPLSLPVTPGEPASISCRSSQSLLHSNGYNYLNWYLQK | 346 |
| | | PGQSPQLLIYLGSKRASGVPDRFSGSGSGTDFTLHITRVGAEDV | |
| | | GVYYCMQALQTPYTFGQGTKLEIK | |
| | scFv | QVQLVQSGAEVRKTGASVKVSCKASGYIFDNFGINWVRQAPGQ | 347 |
| | | GLEWMGWINPKNNNTNYAQKFQGRVTITADESTNTAYMEVSSL | |
| | | RSEDTAVYYCARGPYYYQSYMDVWGQGTMVTVSSASGGGGS | |
| | | GGRASGGGGSDIVMTQTPLSLPVTPGEPASISCRSSQSLLHSNG | |
| | | YNYLNWYLQKPGQSPQLLIYLGSKRASGVPDRFSGSGSGTDFTL | |
| | | HITRVGAEDVGVYYCMQALQTPYTFGQGTKLEIK | |
| BCMA-6 | VH | QVQLQESGGGLVQPGGSLRLSCAASGFTFSSDAMTWVRQAPG | 348 |
| | | KGLEWVSVISGSGGTTYYADSVKGRFTISRDNSKNTLYLQMNSL | |
| | | RAEDTAVYYCAKLDSSGYYYARGPRYWGQGTLVTVSS | |
| | VL | DIQLTQSPSSLSASVGDRVTITCRASQSISSYLNWYQQKPGKAPK | 349 |
| | | LLIYGASTLASGVPARFSGSGSGTHFTLTINSLQSEDSATYYCQQ | |
| | | SYKRASFGQGTKVEIK | |
| | scFv | QVQLQESGGGLVQPGGSLRLSCAASGFTFSSDAMTWVRQAPG | 350 |
| | | KGLEWVSVISGSGGTTYYADSVKGRFTISRDNSKNTLYLQMNSL | |
| | | RAEDTAVYYCAKLDSSGYYYARGPRYWGQGTLVTVSSASGGG | |
| | | GSGGRASGGGGSDIQLTQSPSSLSASVGDRVTITCRASQSISSY | |
| | | LNWYQQKPGKAPKLLIYGASTLASGVPARFSGSGSGTHFTLTINS | |
| | | LQSEDSATYYCQQSYKRASFGQGTKVEIK | |
| BCMA-7 | VH | QVQLVQSGAEVKKPGASVKVSCKASGYTFSNYGITWVRQAPGQ | 351 |
| | | GLEWMGWISAYNGNTNYAQKFQGRVTMTRNTSISTAYMELSSL | |
| | | RSEDTAVYYCARGPYYYYMDVWGKGTMVTVSS | |
| | VL | EIVMTQSPLSLPVTPGEPASISCRSSQSLLYSNGYNYVDWYLQK | 352 |
| | | PGQSPQLLIYLGSNRASGVPDRFSGSGSGTDFKLQISRVEAEDV | |
| | | GIYYCMQGRQFPYSFGQGTKVEIK | |
| | scFv | QVQLVQSGAEVKKPGASVKVSCKASGYTFSNYGITWVRQAPGQ | 353 |
| | | GLEWMGWISAYNGNTNYAQKFQGRVTMTRNTSISTAYMELSSL | |
| | | RSEDTAVYYCARGPYYYYMDVWGKGTMVTVSSASGGGGSGG | |
| | | RASGGGGSEIVMTQSPLSLPVTPGEPASISCRSSQSLLYSNGYN | |
| | | YVDWYLQKPGQSPQLLIYLGSNRASGVPDRFSGSGSGTDFKLQI | |
| | | SRVEAEDVGIYYCMQGRQFPYSFGQGTKVEIK | |
| BCMA-8 | VH | EVQLLETGGGLVQPGGSLRLSCAVSGFALSNHGMSWVRRAPG | 354 |
| | | KGLEWVSGIVYSGSTYYAASVKGRFTISRDNSRNTLYLQMNSLR | |
| | | PEDTAIYYCSAHGGESDVWGQGTTVTVSS | |
| | VL | EIVLTQSPATLSVSPGESATLSCRASQSVSSNLAWYQQKPGQAP | 355 |
| | | RLLIYGASTRASGIPDRFSGSGSGTDFTLTISSLQAEDVAVYYCQ | |
| | | QYGSSLTFGGGTKVEIK | |
| | scFv | EVQLLETGGGLVQPGGSLRLSCAVSGFALSNHGMSWVRRAPG | 356 |
| | | KGLEWVSGIVYSGSTYYAASVKGRFTISRDNSRNTLYLQMNSLR | |
| | | PEDTAIYYCSAHGGESDVWGQGTTVTVSSASGGGGSGGRASG | |
| | | GGGSEIVLTQSPATLSVSPGESATLSCRASQSVSSNLAWYQQKP | |
| | | GQAPRLLIYGASTRASGIPDRFSGSGSGTDFTLTISSLQAEDVAV | |
| | | YYCQQYGSSLTFGGGTKVEIK | |
| BCMA-9 | VH | EVQLVETGGGLVQPGGSLRLSCAVSGFALSNHGMSWVRRAPG | 357 |
| | | KGLEWVSGIVYSGSTYYAASVKGRFTISRDNSRNTLYLQMNSLR | |
| | | PEDTAIYYCSAHGGESDVWGQGTTVTVSS | |
| | VL | EIVMTQSPATLSVSPGERATLSCRASQSVSSKLAWYQQKPGQA | 358 |
| | | PRLLMYGASIRATGIPDRFSGSGSGTEFTLTISSLEPEDFAVYYC | |
| | | QQYGSSSWTFGQGTKVEIK | |
| | scFv | EVQLVETGGGLVQPGGSLRLSCAVSGFALSNHGMSWVRRAPG | 359 |
| | | KGLEWVSGIVYSGSTYYAASVKGRFTISRDNSRNTLYLQMNSLR | |
| | | PEDTAIYYCSAHGGESDVWGQGTTVTVSSASGGGGSGGRASG | |
| | | GGGSEIVMTQSPATLSVSPGERATLSCRASQSVSSKLAWYQQK | |
| | | PGQAPRLLMYGASIRATGIPDRFSGSGSGTEFTLTISSLEPEDFA | |
| | | VYYCQQYGSSSWTFGQGTKVEIK | |
| BCMA-10 | VH | EVQLVETGGGVVQPGGSLRLSCAVSGFALSNHGMSWVRRAPG | 360 |
| | | KGLEWVSGIVYSGSTYYAASVKGRFTISRDNSRNTLYLQMNSLR | |
| | | PEDTAIYYCSAHGGESDVWGQGTTVTVSS | |
| | VL | EIVLTQSPGTLSLSPGERATLSCRASQSVGSTNLAWYQQKPGQA | 361 |
| | | PRLLIYDASNRATGIPDRFSGGGSGTDFTLTISRLEPEDFAVYYC | |
| | | QQYGSSPPWTFGQGTKVEIK | |
| | scFv | EVQLVETGGGVVQPGGSLRLSCAVSGFALSNHGMSWVRRAPG | 362 |
| | | KGLEWVSGIVYSGSTYYAASVKGRFTISRDNSRNTLYLQMNSLR | |
| | | PEDTAIYYCSAHGGESDVWGQGTTVTVSSASGGGGSGGRASG | |
| | | GGGSEIVLTQSPGTLSLSPGERATLSCRASQSVGSTNLAWYQQ | |
| | | KPGQAPRLLIYDASNRATGIPDRFSGGGSGTDFTLTISRLEPEDF | |
| | | AVYYCQQYGSSPPWTFGQGTKVEIK | |
| BCMA-11 | VH | QVQLVESGGGLVKPGGSLRLSCAASGFTFSDYYMSWIRQAPGK | 363 |
| | | GLEWVSYISSSGSTIYYADSVKGRFTISRDNAKNSLYLQMNSLRA | |
| | | EDTAVYYCARESGDGMDVWGQGTTVTVSS | |
| | VL | DIQMTQSPSSLSASVGDRVTITCRASQSISSYLNWYQQKPGKAP | 364 |
| | | KLLIYAASSLQSGVPSRFSGSGSGTDFTLTISSLQPEDFATYYCQ | |
| | | QSYTLAFGQGTKVDIK | |
| | scFv | QVQLVESGGGLVKPGGSLRLSCAASGFTFSDYYMSWIRQAPGK | 365 |
| | | GLEWVSYISSSGSTIYYADSVKGRFTISRDNAKNSLYLQMNSLRA | |
| | | EDTAVYYCARESGDGMDVWGQGTTVTVSSASGGGGSGGRAS | |
| | | GGGGSDIQMTQSPSSLSASVGDRVTITCRASQSISSYLNWYQQK | |
| | | PGKAPKLLIYAASSLQSGVPSRFSGSGSGTDFTLTISSLQPEDFA | |
| | | TYYCQQSYTLAFGQGTKVDIK | |
| BCMA-12 | VH | QVQLVQSGGGLVKPGGSLRLSCAASGFTFSDYYMSWIRQAPGK | 366 |
| | | GLEWVSYISSSGNTIYYADSVKGRFTISRDNAKNSLYLQMNSLRA | |
| | | EDTAVYYCARSTMVREDYWGQGTLVTVSS | |
| | VL | DIVLTQSPLSLPVTLGQPASISCKSSESLVHNSGKTYLNWFHQRP | 367 |
| | | GQSPRRLIYEVSNRDSGVPDRFTGSGSGTDFTLKISRVEAEDVG | |
| | | VYYCMQGTHWPGTFGQGTKLEIK | |
| | scFv | QVQLVQSGGGLVKPGGSLRLSCAASGFTFSDYYMSWIRQAPGK | 368 |
| | | GLEWVSYISSSGNTIYYADSVKGRFTISRDNAKNSLYLQMNSLRA | |
| | | EDTAVYYCARSTMVREDYWGQGTLVTVSSASGGGGSGGRASG | |
| | | GGGSDIVLTQSPLSLPVTLGQPASISCKSSESLVHNSGKTYLNWF | |
| | | HQRPGQSPRRLIYEVSNRDSGVPDRFTGSGSGTDFTLKISRVEA | |
| | | EDVGVYYCMQGTHWPGTFGQGTKLEIK | |
| BCMA-13 | VH | QVQLVESGGGLVQPGGSLRLSCAVSGFALSNHGMSWVRRAPG | 369 |
| | | KGLEWVSGIVYSGSTYYAASVKGRFTISRDNSRNTLYLQMNSLR | |
| | | PEDTAIYYCSAHGGESDVWGQGTTVTVSS | |
| | VL | DIRLTQSPSPLSASVGDRVTITCQASEDINKFLNWYHQTPGKAPK | 370 |
| | | LLIYDASTLQTGVPSRFSGSGSGTDFTLTINSLQPEDIGTYYCQQ | |
| | | YESLPLTFGGGTKVEIK | |
| | scFv | QVQLVESGGGLVQPGGSLRLSCAVSGFALSNHGMSWVRRAPG | 371 |
| | | KGLEWVSGIVYSGSTYYAASVKGRFTISRDNSRNTLYLQMNSLR | |
| | | PEDTAIYYCSAHGGESDVWGQGTTVTVSSASGGGGSGGRASG | |
| | | GGGSDIRLTQSPSPLSASVGDRVTITCQASEDINKFLNWYHQTP | |
| | | GKAPKLLIYDASTLQTGVPSRFSGSGSGTDFTLTINSLQPEDIGTY | |
| | | YCQQYESLPLTFGGGTKVEIK | |
| BCMA-14 | VH | EVQLVETGGGLVQPGGSLRLSCAVSGFALSNHGMSWVRRAPG | 357 |
| | | KGLEWVSGIVYSGSTYYAASVKGRFTISRDNSRNTLYLQMNSLR | |
| | | PEDTAIYYCSAHGGESDVWGQGTTVTVSS | |
| | VL | ETTLTQSPATLSVSPGERATLSCRASQSVGSNLAWYQQKPGQG | 372 |
| | | PRLLIYGASTRATGIPARFSGSGSGTEFTLTISSLQPEDFAVYYCQ | |
| | | QYNDWLPVTFGQGTKVEIK | |
| | scFv | EVQLVETGGGLVQPGGSLRLSCAVSGFALSNHGMSWVRRAPG | 373 |
| | | KGLEWVSGIVYSGSTYYAASVKGRFTISRDNSRNTLYLQMNSLR | |
| | | PEDTAIYYCSAHGGESDVWGQGTTVTVSSASGGGGSGGRASG | |
| | | GGGSETTLTQSPATLSVSPGERATLSCRASQSVGSNLAWYQQK | |
| | | PGQGPRLLIYGASTRATGIPARFSGSGSGTEFTLTISSLQPEDFA | |
| | | VYYCQQYNDWLPVTFGQGTKVEIK | |
| BCMA-15 | VH | EVQLVESGGGLVQPGGSLRLSCAVSGFALSNHGMSWVRRAPG | 333 |
| | | KGLEWVSGIVYSGSTYYAASVKGRFTISRDNSRNTLYLQMNSLR | |
| | | PEDTAIYYCSAHGGESDVWGQGTTVTVSS | |
| | VL | EIVLTQSPGTLSLSPGERATLSCRASQSIGSSSLAWYQQKPGQA | 374 |
| | | PRLLMYGASSRASGIPDRFSGSGSGTDFTLTISRLEPEDFAVYYC | |
| | | QQYAGSPPFTFGQGTKVEIK | |
| | scFv | EVQLVESGGGLVQPGGSLRLSCAVSGFALSNHGMSWVRRAPG | 375 |
| | | KGLEWVSGIVYSGSTYYAASVKGRFTISRDNSRNTLYLQMNSLR | |
| | | PEDTAIYYCSAHGGESDVWGQGTTVTVSSASGGGGSGGRASG | |
| | | GGGSEIVLTQSPGTLSLSPGERATLSCRASQSIGSSSLAWYQQK | |
| | | PGQAPRLLMYGASSRASGIPDRFSGSGSGTDFTLTISRLEPEDF | |
| | | AVYYCQQYAGSPPFTFGQGTKVEIK | |
| BCMA-16 | VH | QVQLQESGPGLVKPSETLSLTCTVSGGSISSSYYYWGWIRQPPG | 376 |
| | | KGLEWIGSIYYSGSAYYNPSLKSRVTISVDTSKNQFSLRLSSVTA | |
| | | ADTAVYYCARHWQEWPDAFDIWGQGTMVTVSS | |
| | VL | ETTLTQSPAFMSATPGDKVIISCKASQDIDDAMNWYQQKPGEAP | 377 |
| | | LFIIQSATSPVPGIPPRFSGSGFGTDFSLTINNIESEDAAYYFCLQH | |
| | | DNFPLTFGQGTKLEIK | |
| | scFv | QVQLQESGPGLVKPSETLSLTCTVSGGSISSSYYYWGWIRQPPG | 378 |
| | | KGLEWIGSIYYSGSAYYNPSLKSRVTISVDTSKNQFSLRLSSVTA | |
| | | ADTAVYYCARHWQEWPDAFDIWGQGTMVTVSSGGGGSGGGG | |
| | | SGGGGSETTLTQSPAFMSATPGDKVIISCKASQDIDDAMNWYQQ | |
| | | KPGEAPLFIIQSATSPVPGIPPRFSGSGFGTDFSLTINNIESEDAAY | |
| | | YFCLQHDNFPLTFGQGTKLEIK | |
| BCMA-17 | VH | QVNLRESGPALVKPTQTLTLTCTFSGFSLRTSGMCVSWIRQPPG | 379 |
| | | KALEWLARIDWDEDKFYSTSLKTRLTISKDTSDNQVVLRMTNMD | |
| | | PADTATYYCARSGAGGTSATAFDIWGPGTMVTVSS | |
| | VL | DIQMTQSPSSLSASVGDRVTITCRASQDIYNNLAWFQLKPGSAP | 380 |
| | | RSLMYAANKSQSGVPSRFSGSASGTDFTLTISSLQPEDFATYYC | |
| | | QHYYRFPYSFGQGTKLEIK | |
| | scFv | VNLRESGPALVKPTQTLTLTCTFSGFSLRTSGMCVSWIRQPPGK | 381 |
| | | ALEWLARIDWDEDKFYSTSLKTRLTISKDTSDNQVVLRMTNMDP | |
| | | ADTATYYCARSGAGGTSATAFDIWGPGTMVTVSSGGGGSGGG | |
| | | GSGGGGSDIQMTQSPSSLSASVGDRVTITCRASQDIYNNLAWFQ | |
| | | LKPGSAPRSLMYAANKSQSGVPSRFSGSASGTDFTLTISSLQPE | |
| | | DFATYYCQHYYRFPYSFGQGTKLEIK | |
| BCMA-18 | VH | EVQLVESGGGLVKPGGSLRLSCAASGFTFSSYSMNWVRQAPGK | 382 |
| | | GLEWVSSISSSSSYIYYADSVKGRFTISRDNAKNSLYLQMNSLRA | |
| | | EDTAVYYCAKTIAAVYAFDIWGQGTTVTVSS | |
| | VL | EIVLTQSPLSLPVTPEEPASISCRSSQSLLHSNGYNYLDWYLQKP | 383 |
| | | GQSPQLLIYLGSNRASGVPDRFSGSGSGTDFTLKISRVEAEDVG | |
| | | VYYCMQALQTPYTFGQGTKLEIK | |
| | scFv | EVQLVESGGGLVKPGGSLRLSCAASGFTFSSYSMNWVRQAPGK | 384 |
| | | GLEWVSSISSSSSYIYYADSVKGRFTISRDNAKNSLYLQMNSLRA | |
| | | EDTAVYYCAKTIAAVYAFDIWGQGTTVTVSSGGGGSGGGGSGG | |
| | | GGSEIVLTQSPLSLPVTPEEPASISCRSSQSLLHSNGYNYLDWYL | |
| | | QKPGQSPQLLIYLGSNRASGVPDRFSGSGSGTDFTLKISRVEAE | |
| | | DVGVYYCMQALQTPYTFGQGTKLEIK | |
| BCMA-19 | VH | EVQLVESGGGLVKPGGSLRLSCAASGFTFSDYYMSWIRQAPGK | 385 |
| | | GLEWVSYISSSGSTIYYADSVKGRFTISRDNAKNSLYLQMNSLRA | |
| | | EDTAVYYCARDLRGAFDIWGQGTMVTVSS | |
| | VL | SYVLTQSPSVSAAPGYTATISCGGNNIGTKSVHWYQQKPGQAPL | 386 |
| | | LVIRDDSVRPSKIPGRFSGSNSGNMATLTISGVQAGDEADFYCQ | |
| | | VWDSDSEHVVFGGGTKLTVL | |
| | scFv | EVQLVESGGGLVKPGGSLRLSCAASGFTFSDYYMSWIRQAPGK | 387 |
| | | GLEWVSYISSSGSTIYYADSVKGRFTISRDNAKNSLYLQMNSLRA | |
| | | EDTAVYYCARDLRGAFDIWGQGTMVTVSSGGGGSGGGGSGGG | |
| | | GSSYVLTQSPSVSAAPGYTATISCGGNNIGTKSVHWYQQKPGQ | |
| | | APLLVIRDDSVRPSKIPGRFSGSNSGNMATLTISGVQAGDEADFY | |
| | | CQVWDSDSEHVVFGGGTKLTVL | |
| BCMA-20 | VH | QVQLVQSGAEVKKPGASVKVSCKPSGYTVTSHYIHWVRRAPGQ | 388 |
| | | GLEWMGMINPSGGVTAYSQTLQGRVTMTSDTSSSTVYMELSSL | |
| | | RSEDTAMYYCAREGSGSGWYFDFWGRGTLVTVSS | |
| | VL | SYVLTQPPSVSVSPGQTASITCSGDGLSKKYVSWYQQKAGQSP | 389 |
| | | WVLISRDKERPSGIPDRFSGSNSADTATLTISGTQAMDEADYYCQ | |
| | | AWDDTTVVFGGGTKLTVL | |
| | scFv | QVQLVQSGAEVKKPGASVKVSCKPSGYTVTSHYIHWVRRAPGQ | 390 |
| | | GLEWMGMINPSGGVTAYSQTLQGRVTMTSDTSSSTVYMELSSL | |
| | | RSEDTAMYYCAREGSGSGWYFDFWGRGTLVTVSSGGGGSGG | |
| | | GGSGGGGSSYVLTQPPSVSVSPGQTASITCSGDGLSKKYVSWY | |
| | | QQKAGQSPVVLISRDKERPSGIPDRFSGSNSADTATLTISGTQA | |
| | | MDEADYYCQAWDDTTVVFGGGTKLTVL | |
| BCMA-21 | VH | QVQLQESGPGLVKPSQTLSLTCTVSGGSISSGGYYWSWIRQHP | 391 |
| | | GKGLEWIGYIYYSGSTYYNPSLKSRVTISVDTSKNQFSLKLSSVT | |
| | | AADTAVYYCARAGIAARLRGAFDIWGQGTMVTVSS | |
| | VL | DIVMTQSPSSVSASVGDRVIITCRASQGIRNWLAWYQQKPGKAP | 392 |
| | | NLLIYAASNLQSGVPSRFSGSGSGADFTLTISSLQPEDVATYYCQ | |
| | | KYNSAPFTFGPGTKVDIK | |
| | scFv | QVQLQESGPGLVKPSQTLSLTCTVSGGSISSGGYYWSWIRQHP | 393 |
| | | GKGLEWIGYIYYSGSTYYNPSLKSRVTISVDTSKNQFSLKLSSVT | |
| | | AADTAVYYCARAGIAARLRGAFDIWGQGTMVTVSSGGGGSGGG | |
| | | GSGGGGSDIVMTQSPSSVSASVGDRVIITCRASQGIRNWLAWY | |
| | | QQKPGKAPNLLIYAASNLQSGVPSRFSGSGSGADFTLTISSLQPE | |
| | | DVATYYCQKYNSAPFTFGPGTKVDIK | |
| BCMA-22 | VH | QVQLVQSGAEVKKPGSSVKVSCKASGGTFSSYAISWVRQAPGQ | 394 |
| | | GLEWMGGIIPIFGTANYAQKFQGRVTITADESTSTAYMELSSLRS | |
| | | EDTAVYYCARRGGYQLLRWDVGLLRSAFDIWGQGTMVTVSS | |
| | VL | SYVLTQPPSVSVAPGQTARITCGGNNIGSKSVHWYQQKPGQAP | 395 |
| | | VLVLYGKNNRPSGVPDRFSGSRSGTTASLTITGAQAEDEADYYC | |
| | | SSRDSSGDHLRVFGTGTKVTVL | |
| | scFv | QVQLVQSGAEVKKPGSSVKVSCKASGGTFSSYAISWVRQAPGQ | 396 |
| | | GLEWMGGIIPIFGTANYAQKFQGRVTITADESTSTAYMELSSLRS | |
| | | EDTAVYYCARRGGYQLLRWDVGLLRSAFDIWGQGTMVTVSSG | |
| | | GGGSGGGGSGGGGSSYVLTQPPSVSVAPGQTARITCGGNNIGS | |
| | | KSVHWYQQKPGQAPVLVLYGKNNRPSGVPDRFSGSRSGTTASL | |
| | | TITGAQAEDEADYYCSSRDSSGDHLRVFGTGTKVTVL | |
| BCMA-23 | VH | EVQLQQSGPGLVKPSQTLSLTCAISGDSVSSNSAAWNWIRQSPS | 397 |
| | | RGLEWLGRTYYRSKWYSFYAISLKSRIIINPDTSKNQFSLQLKSVT | |
| | | PEDTAVYYCARSSPEGLFLYWFDPWGQGTLVTVSS | |
| | VL | SSELTQDPAVSVALGQTIRITCQGDSLGNYYATWYQQKPGQAPV | 398 |
| | | LVIYGTNNRPSGIPDRFSASSSGNTASLTITGAQAEDEADYYCNS | |
| | | RDSSGHHLLFGTGTKVTVL | |
| | ScFv | EVQLQQSGPGLVKPSQTLSLTCAISGDSVSSNSAAWNWIRQSPS | 399 |
| | | RGLEWLGRTYYRSKWYSFYAISLKSRIIINPDTSKNQFSLQLKSVT | |
| | | PEDTAVYYCARSSPEGLFLYWFDPWGQGTLVTVSSGGDGSGG | |
| | | GGSGGGGSSSELTQDPAVSVALGQTIRITCQGDSLGNYYATWY | |
| | | QQKPGQAPVLVIYGTNNRPSGIPDRFSASSSGNTASLTITGAQAE | |
| | | DEADYYCNSRDSSGHHLLFGTGTKVTVL | |
| BCMA-24 | VH | EVQLVESGGGLVQPGGSLRLSCAASGFTFSSYAMSWVRQAPG | 400 |
| | | KGLEWVSAISGSGGSTYYADSVKGRFTISRDNSKNTLYLQMNSL | |
| | | RAEDTAVYYCAKVEGSGSLDYWGQGTLVTVSS | |
| | VL | EIVMTQSPGTLSLSPGERATLSCRASQSVSSAYLAWYQQKPGQ | 401 |
| | | PPRLLISGASTRATGIPDRFGGSGSGTDFTLTISRLEPEDFAVYYC | |
| | | QHYGSSFNGSSLFTFGQGTRLEIK | |
| | scFv | EVQLVESGGGLVQPGGSLRLSCAASGFTFSSYAMSWVRQAPG | 402 |
| | | KGLEWVSAISGSGGSTYYADSVKGRFTISRDNSKNTLYLQMNSL | |
| | | RAEDTAVYYCAKVEGSGSLDYWGQGTLVTVSSGGGGSGGGGS | |
| | | GGGGSEIVMTQSPGTLSLSPGERATLSCRASQSVSSAYLAWYQ | |
| | | QKPGQPPRLLISGASTRATGIPDRFGGSGSGTDFTLTISRLEPED | |
| | | FAVYYCQHYGSSFNGSSLFTFGQGTRLEIK | |
| | VH | EVQLVETGGGLVQPGGSLRLSCAASGITFSRYPMSWVRQAPGK | 403 |
| | | GLEWVSGISDSGVSTYYADSAKGRFTISRDNSKNTLFLQMSSLR | |
| | | DEDTAVYYCVTRAGSEASDIWGQGTMVTVSS | |
| BCMA-25 | VL | EIVLTQSPATLSLSPGERATLSCRASQSVSNSLAWYQQKPGQAP | 404 |
| | | RLLIYDASSRATGIPDRFSGSGSGTDFTLTISRLEPEDFAIYYCQQ | |
| | | FGTSSGLTFGGGTKLEIK | |
| | ScF | EVQLVETGGGLVQPGGSLRLSCAASGITFSRYPMSWVRQAPGK | 405 |
| | | GLEWVSGISDSGVSTYYADSAKGRFTISRDNSKNTLFLQMSSLR | |
| | | DEDTAVYYCVTRAGSEASDIWGQGTMVTVSSGGGGSGGGGSG | |
| | | GGGSEIVLTQSPATLSLSPGERATLSCRASQSVSNSLAWYQQKP | |
| | | GQAPRLLIYDASSRATGIPDRFSGSGSGTDFTLTISRLEPEDFAIY | |
| | | YCQQFGTSSGLTFGGGTKLEIK | |
| BCMA-26 | VH | QVQLVESGGGLVQPGGSLRLSCAASGFTFSSYAMSWVRQAPG | 406 |
| | | KGLEWVSAISGSGGSTYYADSVKGRFTISRDNAKNSLYLQMNSL | |
| | | RAEDTAIYYCARATYKRELRYYYGMDVWGQGTMVTVSS | |
| | VL | EIVMTQSPGTVSLSPGERATLSCRASQSVSSSFLAWYQQKPGQ | 407 |
| | | APRLLIYGASSRATGIPDRFSGSGSGTDFTLTISRLEPEDSAVYYC | |
| | | QQYHSSPSWTFGQGTRLEIK | |
| | scFv | QVQLVESGGGLVQPGGSLRLSCAASGFTFSSYAMSWVRQAPG | 408 |
| | | KGLEWVSAISGSGGSTYYADSVKGRFTISRDNAKNSLYLQMNSL | |
| | | RAEDTAIYYCARATYKRELRYYYGMDVWGQGTMVTVSSGGGG | |
| | | SGGGGSGGGGSEIVMTQSPGTVSLSPGERATLSCRASQSVSSS | |
| | | FLAWYQQKPGQAPRLLIYGASSRATGIPDRFSGSGSGTDFTLTIS | |
| | | RLEPEDSAVYYCQQYHSSPSWTFGQGTRLEIK | |
| BCMA-27 | VH | EVQLVETGGGLVQPGGSLRLSCAASGFTFSSYAMSWVRQAPGK | 409 |
| | | GLEWVSAISGSGGSTYYADSVKGRFTISRDNSKNTLYLQMNTLK | |
| | | AEDTAVYYCARATYKRELRYYYGMDVWGQGTTVTVSS | |
| | VL | EIVLTQSPSTLSLSPGESATLSCRASQSVSTTFLAWYQQKPGQA | 410 |
| | | PRLLIYGSSNRATGIPDRFSGSGSGTDFTLTIRRLEPEDFAVYYC | |
| | | QQYHSSPSWTFGQGTKVEIK | |
| | scFv | EVQLVETGGGLVQPGGSLRLSCAASGFTFSSYAMSWVRQAPGK | 411 |
| | | GLEWVSAISGSGGSTYYADSVKGRFTISRDNSKNTLYLQMNTLK | |
| | | AEDTAVYYCARATYKRELRYYYGMDVWGQGTTVTVSSGGGGS | |
| | | GGGGSGGGGSEIVLTQSPSTLSLSPGESATLSCRASQSVSTTFL | |
| | | AWYQQKPGQAPRLLIYGSSNRATGIPDRFSGSGSGTDFTLTIRR | |
| | | LEPEDFAVYYCQQYHSSPSWTFGQGTKVEIK | |
| BCMA-28 | VH | EVQLVETGGGLVQPGRSLRLSCAASGFTFDDYAMHWVRQAPG | 412 |
| | | KGLEWVSGISWNSGSIGYADSVKGRFTISRDNAKNSLYLQMNSL | |
| | | RDEDTAVYYCARVGKAVPDVWGQGTTVTVSS | |
| | VL | DIVMTQTPSSLSASVGDRVTITCRASQSISSYLNWYQQKPGKAP | 413 |
| | | KLLIYAASSLQSGVPSRFSGSGSGTDFTLTISSLQPEDFATYYCQ | |
| | | QSYSTPYSFGQGTRLEIK | |
| | scFv | EVQLVETGGGLVQPGRSLRLSCAASGFTFDDYAMHWVRQAPG | 414 |
| | | KGLEWVSGISWNSGSIGYADSVKGRFTISRDNAKNSLYLQMNSL | |
| | | RDEDTAVYYCARVGKAVPDVWGQGTTVTVSSGGGGSGGGGS | |
| | | GGGGSDIVMTQTPSSLSASVGDRVTITCRASQSISSYLNWYQQK | |
| | | PGKAPKLLIYAASSLQSGVPSRFSGSGSGTDFTLTISSLQPEDFA | |
| | | TYYCQQSYSTPYSFGQGTRLEIK | |
| BCMA-29 | VH | EVQLVESGGGLVQPGRSLRLSCTASGFTFDDYAMHWVRQRPG | 415 |
| | | KGLEWVASINWKGNSLAYGDSVKGRFAISRDNAKNTVFLQMNSL | |
| | | RTEDTAVYYCASHQGVAYYNYAMDVWGRGTLVTVSS | |
| | VL | EIVLTQSPGTLSLSPGERATLSCRATQSIGSSFLAWYQQRPGQA | 416 |
| | | PRLLIYGASQRATGIPDRFSGRGSGTDFTLTISRVEPEDSAVYYC | |
| | | QHYESSPSWTFGQGTKVEIK | |
| | scFv | EVQLVESGGGLVQPGRSLRLSCTASGFTFDDYAMHWVRQRPG | 417 |
| | | KGLEWVASINWKGNSLAYGDSVKGRFAISRDNAKNTVFLQMNSL | |
| | | RTEDTAVYYCASHQGVAYYNYAMDVWGRGTLVTVSSGGGGSG | |
| | | GGGSGGGGSEIVLTQSPGTLSLSPGERATLSCRATQSIGSSFLA | |
| | | WYQQRPGQAPRLLIYGASQRATGIPDRFSGRGSGTDFTLTISRV | |
| | | EPEDSAVYYCQHYESSPSWTFGQGTKVEIK | |
| BCMA-30 | VH | EVQLVESGGGLVQPGGSLRLSCAASGFTFSSYAMSWVRQAPG | 418 |
| | | KGLEWVSAISGSGGSTYYADSVKGRFTISRDNSKNTLYLQMNSL | |
| | | RAEDTAVYYCAKVVRDGMDVWGQGTTVTVSS | |
| | VL | EIVLTQSPATLSLSPGERATLSCRASQSVSSSYLAWYQQKPGQA | 419 |
| | | PRLLIYGASSRATGIPDRFSGNGSGTDFTLTISRLEPEDFAVYYC | |
| | | QQYGSPPRFTFGPGTKVDIK | |
| | scFv | EVQLVESGGGLVQPGGSLRLSCAASGFTFSSYAMSWVRQAPG | 420 |
| | | KGLEWVSAISGSGGSTYYADSVKGRFTISRDNSKNTLYLQMNSL | |
| | | RAEDTAVYYCAKVVRDGMDVWGQGTTVTVSSGGGGSGGGGS | |
| | | GGGGSEIVLTQSPATLSLSPGERATLSCRASQSVSSSYLAWYQQ | |
| | | KPGQAPRLLIYGASSRATGIPDRFSGNGSGTDFTLTISRLEPEDF | |
| | | AVYYCQQYGSPPRFTFGPGTKVDIK | |
| BCMA-31 | VH | EVQLLESGGGLVQPGGSLRLSCAASGFTFSSYAMSWVRQAPGK | 421 |
| | | GLEWVSAISGSGGSTYYADSVKGRFTISRDNSKNTLYLQMNSLR | |
| | | AEDTAVYYCAKIPQTGTFDYWGQGTLVTVSS | |
| | VL | EIVLTQSPGTLSLSPGERATLSCRASQSVSSSYLAWYQQRPGQA | 422 |
| | | PRLLIYGASSRATGIPDRFSGSGSGTDFTLTISRLEPEDFAVYYC | |
| | | QHYGSSPSWTFGQGTRLEIK | |
| | scFv | EVQLLESGGGLVQPGGSLRLSCAASGFTFSSYAMSWVRQAPGK | 423 |
| | | GLEWVSAISGSGGSTYYADSVKGRFTISRDNSKNTLYLQMNSLR | |
| | | AEDTAVYYCAKIPQTGTFDYWGQGTLVTVSSGGGGSGGGGSG | |
| | | GGGSEIVLTQSPGTLSLSPGERATLSCRASQSVSSSYLAWYQQR | |
| | | PGQAPRLLIYGASSRATGIPDRFSGSGSGTDFTLTISRLEPEDFA | |
| | | VYYCQHYGSSPSWTFGQGTRLEIK | |
| BCMA-32 | VH | EVQLVETGGGLVQPGGSLRLSCAASGFTFSSYAMSWVRQAPGK | 424 |
| | | GLEWVSAISGSGGSTYYADSVKGRFTMSRENDKNSVFLQMNSL | |
| | | RVEDTGVYYCARANYKRELRYYYGMDVWGQGTMVTVSS | |
| | VL | EIVMTQSPGTLSLSPGESATLSCRASQRVASNYLAWYQHKPGQ | 425 |
| | | APSLLISGASSRATGVPDRFSGSGSGTDFTLAISRLEPEDSAVYY | |
| | | CQHYDSSPSWTFGQGTKVEIK | |
| | scFv | EVQLVETGGGLVQPGGSLRLSCAASGFTFSSYAMSWVRQAPGK | 426 |
| | | GLEWVSAISGSGGSTYYADSVKGRFTMSRENDKNSVFLQMNSL | |
| | | RVEDTGVYYCARANYKRELRYYYGMDVWGQGTMVTVSSGGG | |
| | | GSGGGGSGGGGSEIVMTQSPGTLSLSPGESATLSCRASQRVAS | |
| | | NYLAWYQHKPGQAPSLLISGASSRATGVPDRFSGSGSGTDFTLA | |
| | | ISRLEPEDSAVYYCQHYDSSPSWTFGQGTKVEIK | |
| BCMA-33 | VH | EVQLLETGGGLVQPGGSLRLSCAASGFSFSSYAMSWVRQAPGK | 427 |
| | | GLEWVSAISGSGGSTYYADSVKGRFTISRDNSKNTLYLQMNSLR | |
| | | AEDTAVYYCAKALVGATGAFDIWGQGTLVTVSS | |
| | VL | EIVLTQSPGTLSLSPGERATLSCRASQSLSSNFLAWYQQKPGQA | 428 |
| | | PGLLIYGASNWATGTPDRFSGSGSGTDFTLTITRLEPEDFAVYYC | |
| | | QYYGTSPMYTFGQGTKVEIK | |
| | scFv | EVQLLETGGGLVQPGGSLRLSCAASGFSFSSYAMSWVRQAPGK | 429 |
| | | GLEWVSAISGSGGSTYYADSVKGRFTISRDNSKNTLYLQMNSLR | |
| | | AEDTAVYYCAKALVGATGAFDIWGQGTLVTVSSGGGGSGGGGS | |
| | | GGGGSEIVLTQSPGTLSLSPGERATLSCRASQSLSSNFLAWYQQ | |
| | | KPGQAPGLLIYGASNWATGTPDRFSGSGSGTDFTLTITRLEPED | |
| | | FAVYYCQYYGTSPMYTFGQGTKVEIK | |
| BCMA-34 | VI | EVQLLESGGGLVQPGGSLRLSCAASGFTFSSYAMSWVRQAPGK | 430 |
| | | GLEWVSAISGSGGSTYYADSVKGRFTISRDNSKNTLYLQMNSLR | |
| | | AEDTAVYYCVLWFGEGFDPWGQGTLVTVSS | |
| | VL | DIVLTQSPLSLPVTPGEPASISCRSSQSLLHSNGYNYLDWYLQKP | 43' |
| | | GQSPQLLIYLGSNRASGVPDRFSGSGSGTDFTLKISRVEAEDVG | |
| | | VYYCMQALQTPLTFGGGTKVDIK | |
| | scFv | EVQLLESGGGLVQPGGSLRLSCAASGFTFSSYAMSWVRQAPGK | 432 |
| | | GLEWVSAISGSGGSTYYADSVKGRFTISRDNSKNTLYLQMNSLR | |
| | | AEDTAVYYCVLWFGEGFDPWGQGTLVTVSSGGGGSGGGGSG | |
| | | GGGSDIVLTQSPLSLPVTPGEPASISCRSSQSLLHSNGYNYLDW | |
| | | YLQKPGQSPQLLIYLGSNRASGVPDRFSGSGSGTDFTLKISRVE | |
| | | AEDVGVYYCMQALQTPLTFGGGTKVDIK | |
| BCMA-35 | VH | QVQLVESGGGLVQPGGSLRLSCAASGFTFSSYAMSWVRQAPG | 433 |
| | | KGLEWVSAISGSGGSTYYADSVKGRFTISRDNSKNTLYLQMNSL | |
| | | RAEDTAVYYCAKVGYDSSGYYRDYYGMDVWGQGTTVTVSS | |
| | VL | EIVLTQSPGTLSLSPGERATLSCRASQSVSSSYLAWYQQKPGQA | 434 |
| | | PRLLIYGTSSRATGISDRFSGSGSGTDFTLTISRLEPEDFAVYYCQ | |
| | | HYGNSPPKFTFGPGTKLEIK | |
| | scFv | QVQLVESGGGLVQPGGSLRLSCAASGFTFSSYAMSWVRQAPG | 435 |
| | | KGLEWVSAISGSGGSTYYADSVKGRFTISRDNSKNTLYLQMNSL | |
| | | RAEDTAVYYCAKVGYDSSGYYRDYYGMDVWGQGTTVTVSSGG | |
| | | GGSGGGGSGGGGSEIVLTQSPGTLSLSPGERATLSCRASQSVS | |
| | | SSYLAWYQQKPGQAPRLLIYGTSSRATGISDRFSGSGSGTDFTL | |
| | | TISRLEPEDFAVYYCQHYGNSPPKFTFGPGTKLEIK | |
| BCMA-36 | VH | EVQLVESGGGLVQPGGSLRLSCAASGFTFSSYAMSWVRQAPG | 436 |
| | | KGLEWVSAISGSGGSTYYADSVKGRFTISRDNSKNTLYLQMNSL | |
| | | RAEDTAVYYCAKMGWSSGYLGAFDIWGQGTTVTVSS | |
| | VL | EIVLTQSPGTLSLSPGERATLSCRASQSVASSFLAWYQQKPGQA | 437 |
| | | PRLLIYGASGRATGIPDRFSGSGSGTDFTLTISRLEPEDFAVYYC | |
| | | QHYGGSPRLTFGGGTKVDIK | |
| | scFv | EVQLVESGGGLVQPGGSLRLSCAASGFTFSSYAMSWVRQAPG | 438 |
| | | KGLEWVSAISGSGGSTYYADSVKGRFTISRDNSKNTLYLQMNSL | |
| | | RAEDTAVYYCAKMGWSSGYLGAFDIWGQGTTVTVSSGGGGSG | |
| | | GGGSGGGGSEIVLTQSPGTLSLSPGERATLSCRASQSVASSFLA | |
| | | WYQQKPGQAPRLLIYGASGRATGIPDRFSGSGSGTDFTLTISRL | |
| | | EPEDFAVYYCQHYGGSPRLTFGGGTKVDIK | |
| BCMA-37 | VH | QIQLVQSGPDLKKPGETVKLSCKASGYTFTNFGMNWVKQAPGK | 439 |
| | | GFKWMAWINTYTGESYFADDFKGRFAFSVETSATTAYLQINNLK | |
| | | TEDTATYFCARGEIYYGYDGGFAYWGQGTLVTVSA | |
| | VL | DVVMTQSHRFMSTSVGDRVSITCRASQDVNTAVSWYQQKPGQ | 440 |
| | | SPKLLIFSASYRYTGVPDRFTGSGSGADFTLTISSVQAEDLAVYY | |
| | | CQQHYSTPWTFGGGTKLDIK | |
| | scFv | QIQLVQSGPDLKKPGETVKLSCKASGYTFTNFGMNWVKQAPGK | 441 |
| | | GFKWMAWINTYTGESYFADDFKGRFAFSVETSATTAYLQINNLK | |
| | | TEDTATYFCARGEIYYGYDGGFAYWGQGTLVTVSAGGGGSGG | |
| | | GGSGGGGSDVVMTQSHRFMSTSVGDRVSITCRASQDVNTAVS | |
| | | WYQQKPGQSPKLLIFSASYRYTGVPDRFTGSGSGADFTLTISSV | |
| | | QAEDLAVYYCQQHYSTPWTFGGGTKLDIK | |
| BCMA-38 | VH | QIQLVQSGPELKKPGETVKISCKASGYTFTDYSINWVKRAPGKGL | 442 |
| | | KWMGWINTETREPAYAYDFRGRFAFSLETSASTAYLQINNLKYE | |
| | | DTATYFCALDYSYAMDYWGQGTSVTVSS | |
| | VL | DIVLTQSPASLAMSLGKRATISCRASESVSVIGAHLIHWYQQKPG | 443 |
| | | QPPKLLIYLASNLETGVPARFSGSGSGTDFTLTIDPVEEDDVAIYS | |
| | | CLQSRIFPRTFGGGTKLEIK | |
| | scFv | QIQLVQSGPELKKPGETVKISCKASGYTFTDYSINWVKRAPGKGL | 444 |
| | | KWMGWINTETREPAYAYDFRGRFAFSLETSASTAYLQINNLKYE | |
| | | DTATYFCALDYSYAMDYWGQGTSVTVSSGGGGSGGGGSGGG | |
| | | GSQIQLVQSGPELKKPGETVKISCKASGYTFTDYSINWVKRAPG | |
| | | KGLKWMGWINTETREPAYAYDFRGRFAFSLETSASTAYLQINNL | |
| | | KYEDTATYFCALDYSYAMDYWGQGTSVTVSS | |
| BCMA-39 | VH | QIQLVQSGPELKKPGETVKISCKASGYTFRHYSMNWVKQAPGK | 445 |
| | | GLKWMGRINTESGVPIYADDFKGRFAFSVETSASTAYLVINNLKD | |
| | | EDTASYFCSNDYLYSLDFWGQGTALTVSS | |
| | VL | DIVLTQSPPSLAMSLGKRATISCRASESVTILGSHLIYWYQQKPG | 446 |
| | | QPPTLLIQLASNVQTGVPARFSGSGSRTDFTLTIDPVEEDDVAVY | |
| | | YCLQSRTIPRTFGGGTKLEIK | |
| | scFv | QIQLVQSGPELKKPGETVKISCKASGYTFRHYSMNWVKQAPGK | 447 |
| | | GLKWMGRINTESGVPIYADDFKGRFAFSVETSASTAYLVINNLKD | |
| | | EDTASYFCSNDYLYSLDFWGQGTALTVSSGGGGSGGGGSGGG | |
| | | GSDIVLTQSPPSLAMSLGKRATISCRASESVTILGSHLIYWYQQK | |
| | | PGQPPTLLIQLASNVQTGVPARFSGSGSRTDFTLTIDPVEEDDVA | |
| | | VYYCLQSRTIPRTFGGGTKLEIK | |
| BCMA-40 | VH | QIQLVQSGPELKKPGETVKISCKASGYTFTHYSMNWVKQAPGKG | 448 |
| | | LKWMGRINTETGEPLYADDFKGRFAFSLETSASTAYLVINNLKNE | |
| | | DTATFFCSNDYLYSCDYWGQGTTLTVSS | |
| | VL | DIVLTQSPPSLAMSLGKRATISCRASESVTILGSHLIYWYQQKPG | 446 |
| | | QPPTLLIQLASNVQTGVPARFSGSGSRTDFTLTIDPVEEDDVAVY | |
| | | YCLQSRTIPRTFGGGTKLEIK | |
| | scFv | QIQLVQSGPELKKPGETVKISCKASGYTFTHYSMNWVKQAPGKG | 449 |
| | | LKWMGRINTETGEPLYADDFKGRFAFSLETSASTAYLVINNLKNE | |
| | | DTATFFCSNDYLYSCDYWGQGTTLTVSSGGGGGGGGSGGGG | |
| | | SDIVLTQSPPSLAMSLGKRATISCRASESVTILGSHLIYWYQQKP | |
| | | GQPPTLLIQLASNVQTGVPARFSGSGSRTDFTLTIDPVEEDDVAV | |
| | | YYCLQSRTIPRTFGGGTKLEIK | |

TABLE 17B
BCMA Binders-Light chain CDR sequences according to Kabat numbering scheme

| | | SEQ | | SEQ | | SEQ |
|---|---|---|---|---|---|---|
| | | ID | | ID | | ID |
| Antibody | CDR-L1 | NO: | CDR-L2 | NO: | CDR-L3 | NO: |
| BCMA-1 | RASQSISSYLN | 450 | AASSLQS | 482 | QQSYSTPYT | 511 |
| BCMA-2 | RASQSISSSFLA | 451 | GASRRAT | 483 | QQYHSSPSWT | 512 |
| BCMA-3 | RSSQSLLHSNGYNYL | 452 | LGSNRAS | 484 | MQALQTPYT | 513 |
| | D | | | | | |
| BCMA-4 | KSSQSLLRNDGKTPL | 453 | EVSNRFS | 485 | MQNIQFPS | 514 |
| | Y | | | | | |
| BCMA-5 | RSSQSLLHSNGYNYL | 454 | LGSKRAS | 486 | MQALQTPYT | 513 |
| | N | | | | | |
| BCMA-6 | RASQSISSYLN | 450 | GASTLAS | 487 | QQSYKRAS | 515 |
| BCMA-7 | RSSQSLLYSNGYNYV | 455 | LGSNRAS | 484 | MQGRQFPYS | 516 |
| | D | | | | | |
| BCMA-8 | RASQSVSSNLA | 456 | GASTRAS | 488 | QQYGSSLT | 517 |
| BCMA-9 | RASQSVSSKLA | 457 | GASIRAT | 489 | QQYGSSSWT | 518 |
| BCMA-10 | RASQSVGSTNLA | 458 | DASNRAT | 221 | QQYGSSPPWT | 519 |
| BCMA-11 | RASQSISSYLN | 450 | AASSLQS | 482 | QQSYTLA | 520 |
| BCMA-12 | KSSESLVHNSGKTYL | 459 | EVSNRDS | 490 | MQGTHWPGT | 521 |
| | N | | | | | |
| BCMA-13 | QASEDINKFLN | 460 | DASTLQT | 491 | QQYESLPLT | 522 |
| BCMA-14 | RASQSVGSNLA | 461 | GASTRAT | 492 | QQYNDWLPVT | 523 |
| BCMA-15 | RASQSIGSSSLA | 462 | GASSRAS | 493 | QQYAGSPPFT | 524 |
| BCMA-16 | KASQDIDDAMN | 463 | SATSPVP | 494 | LQHDNFPLT | 525 |
| BCMA-17 | RASQDIYNNLA | 464 | AANKSQS | 495 | QHYYRFPYS | 526 |
| BCMA-18 | RSSQSLLHSNGYNYL | 452 | LGSNRAS | 484 | MQALQTPYT | 513 |
| | D | | | | | |
| BCMA-19 | GGNNIGTKSVH | 465 | DDSVRPS | 496 | QVWDSDSEHV | 527 |
| | | | | | V | |
| BCMA-20 | SGDGLSKKYVS | 466 | RDKERPS | 497 | QAWDDTTVV | 528 |
| BCMA-21 | RASQGIRNWLA | 467 | AASNLQS | 498 | QKYNSAPFT | 529 |
| BCMA-22 | GGNNIGSKSVH | 468 | GKNNRPS | 499 | SSRDSSGDHLR | 530 |
| | | | | | V | |
| BCMA-23 | QGDSLGNYYAT | 469 | GTNNRPS | 500 | NSRDSSGHHLL | 531 |
| BCMA-24 | RASQSVSSAYLA | 470 | GASTRAT | 492 | QHYGSSFNGS | 532 |
| | | | | | SLFT | |
| BCMA-25 | RASQSVSNSLA | 471 | DASSRAT | 501 | QQFGTSSGLT | 533 |
| BCMA-26 | RASQSVSSSFLA | 472 | GASSRAT | 502 | QQYHSSPSWT | 512 |
| BCMA-27 | RASQSVSTTFLA | 473 | GSSNRAT | 503 | QQYHSSPSWT | 512 |
| BCMA-28 | RASQSISSYLN | 450 | AASSLQS | 482 | QQSYSTPYS | 534 |
| BCMA-29 | RATQSIGSSFLA | 474 | GASQRAT | 504 | QHYESSPSWT | 535 |
| BCMA-30 | RASQSVSSSYLA | 475 | GASSRAT | 502 | QQYGSPPRFT | 536 |
| BCMA-31 | RASQSVSSSYLA | 475 | GASSRAT | 502 | QHYGSSPSWT | 537 |
| BCMA-32 | RASQRVASNYLA | 476 | GASSRAT | 502 | QHYDSSPSWT | 538 |
| BCMA-33 | RASQSLSSNFLA | 477 | GASNWAT | 505 | QYYGTSPMYT | 539 |
| BCMA-34 | RSSQSLLHSNGYNYL | 452 | LGSNRAS | 484 | MQALQTPLT | 540 |
| | D | | | | | |
| BCMA-35 | RASQSVSSSYLA | 475 | GTSSRAT | 506 | QHYGNSPPKFT | 541 |
| BCMA-36 | RASQSVASSFLA | 478 | GASGRAT | 507 | QHYGGSPRLT | 542 |
| BCMA-37 | RASQDVNTAVS | 479 | SASYRYT | 508 | QQHYSTPWT | 543 |
| BCMA-38 | RASESVSVIGAHLIH | 480 | LASNLET | 509 | LQSRIFPRT | 544 |
| BCMA-39 | RASESVTILGSHLIY | 481 | LASNVQT | 510 | LQSRTIPRT | 545 |
| BCMA-40 | RASESVTILGSHLIY | 481 | LASNVQT | 510 | LQSRTIPRT | 545 |

TABLE 17C
BCMA Binders-Light chain CDR sequences according to Chothia numbering scheme

| | | SEQ | | SEQ | | SEQ |
|---|---|---|---|---|---|---|
| | | ID | | ID | | ID |
| Antibody | CDR-L1 | NO: | CDR-L2 | NO: | CDR-L3 | NO: |
| BCMA-1 | SQSISSY | 546 | AAS | 577 | SYSTPY | 590 |
| BCMA-2 | SQSISSSF | 547 | GAS | 578 | YHSSPSW | 591 |
| BCMA-3 | SQSLLHSNGYNY | 548 | LGS | 579 | ALQTPY | 592 |
| BCMA-4 | SQSLLRNDGKTP | 549 | EVS | 580 | NIQFP | 593 |
| BCMA-5 | SQSLLHSNGYNY | 548 | LGS | 579 | ALQTPY | 592 |
| BCMA-6 | SQSISSY | 546 | GAS | 578 | SYKRA | 594 |
| BCMA-7 | SQSLLYSNGYNY | 550 | LGS | 579 | GRQFPY | 595 |
| BCMA-8 | SQSVSSN | 551 | GAS | 578 | YGSSL | 596 |
| BCMA-9 | SQSVSSK | 552 | GAS | 578 | YGSSSW | 597 |
| BCMA-10 | SQSVGSTN | 553 | DAS | 281 | YGSSPPW | 598 |
| BCMA-11 | SQSISSY | 546 | AAS | 577 | SYTL | 599 |
| BCMA-12 | SESLVHNSGKTY | 554 | EVS | 580 | GTHWPG | 600 |
| BCMA-13 | SEDINKF | 555 | DAS | 281 | YESLPL | 601 |
| BCMA-14 | SQSVGSN | 556 | GAS | 578 | YNDWLPV | 602 |
| BCMA-15 | SQSIGSSS | 557 | GAS | 578 | YAGSPPF | 603 |
| BCMA-16 | SQDIDDA | 558 | SAT | 581 | HDNFPL | 604 |
| BCMA-17 | SQDIYNN | 559 | AAN | 582 | YYRFPY | 605 |
| BCMA-18 | SQSLLHSNGYNY | 548 | LGS | 579 | ALQTPY | 592 |
| BCMA-19 | NNIGTKS | 560 | DDS | 583 | WDSDSEHV | 606 |
| BCMA-20 | DGLSKKY | 561 | RDK | 584 | WDDTTV | 607 |
| BCMA-21 | SQGIRNW | 562 | AAS | 577 | YNSAPF | 608 |
| BCMA-22 | NNIGSKS | 563 | GKN | 585 | RDSSGDHLR | 609 |
| BCMA-23 | DSLGNYY | 564 | GTN | 277 | RDSSGHHL | 610 |
| BCMA-24 | SQSVSSAY | 565 | GAS | 578 | YGSSFNGSSLF | 611 |
| BCMA-25 | SQSVSNS | 566 | DAS | 281 | FGTSSGL | 612 |
| BCMA-26 | SQSVSSSF | 567 | GAS | 578 | YHSSPSW | 591 |
| BCMA-27 | SQSVSTTF | 568 | GSS | 586 | YHSSPSW | 591 |
| BCMA-28 | SQSISSY | 546 | AAS | 577 | SYSTPY | 590 |
| BCMA-29 | TQSIGSSF | 569 | GAS | 578 | YESSPSW | 613 |
| BCMA-30 | SQSVSSSY | 570 | GAS | 578 | YGSPPRF | 614 |
| BCMA-31 | SQSVSSSY | 570 | GAS | 578 | YGSSPSW | 615 |
| BCMA-32 | SQRVASNY | 571 | GAS | 578 | YDSSPSW | 616 |
| BCMA-33 | SQSLSSNF | 572 | GAS | 578 | YGTSPMY | 617 |
| BCMA-34 | SQSLLHSNGYNY | 548 | LGS | 579 | ALQTPL | 618 |
| BCMA-35 | SQSVSSSY | 570 | GTS | 587 | YGNSPPKF | 619 |
| BCMA-36 | SQSVASSF | 573 | GAS | 578 | YGGSPRL | 620 |
| BCMA-37 | SQDVNTA | 574 | SAS | 588 | HYSTPW | 621 |
| BCMA-38 | SESVSVIGAHL | 575 | LAS | 589 | SRIFPR | 622 |
| BCMA-39 | SESVTILGSHL | 576 | LAS | 589 | SRTIPR | 623 |
| BCMA-40 | SESVTILGSHL | 576 | LAS | 589 | SRTIPR | 623 |

TABLE 17D
BCMA Binders-Light chain CDR sequences according to combination of
Kabat and Chothia numbering schemes

| | | SEQ | | SEQ | | SEQ |
|---|---|---|---|---|---|---|
| | | ID | | ID | | ID |
| Antibody | CDR-L1 | NO: | CDR-L2 | NO: | CDR-L3 | NO: |
| BCMA-1 | RASQSISSYLN | 450 | AASSLQS | 482 | QQSYSTPYT | 511 |
| BCMA-2 | RASQSISSSFLA | 451 | GASRRAT | 483 | QQYHSSPSW | 512 |
| | | | | | T | |
| BCMA-3 | RSSQSLLHSNGY | 452 | LGSNRAS | 484 | MQALQTPYT | 513 |
| | NYLD | | | | | |
| BCMA-4 | KSSQSLLRNDGKT | 453 | EVSNRFS | 485 | MQNIQFPS | 514 |
| | PLY | | | | | |
| BCMA-5 | RSSQSLLHSNGY | 454 | LGSKRAS | 486 | MQALQTPYT | 513 |
| | NYLN | | | | | |
| BCMA-6 | RASQSISSYLN | 450 | GASTLAS | 487 | QQSYKRAS | 515 |
| BCMA-7 | RSSQSLLYSNGY | 455 | LGSNRAS | 484 | MQGRQFPYS | 516 |
| | NYVD | | | | | |
| BCMA-8 | RASQSVSSNLA | 456 | GASTRAS | 488 | QQYGSSLT | 517 |
| BCMA-9 | RASQSVSSKLA | 457 | GASIRAT | 489 | QQYGSSSWT | 518 |
| BCMA-10 | RASQSVGSTNLA | 458 | DASNRAT | 221 | QQYGSSPPW | 519 |
| | | | | | T | |
| BCMA-11 | RASQSISSYLN | 450 | AASSLQS | 482 | QQSYTLA | 520 |
| BCMA-12 | KSSESLVHNSGKT | 459 | EVSNRDS | 490 | MQGTHWPGT | 521 |
| | YLN | | | | | |
| BCMA-13 | QASEDINKFLN | 460 | DASTLQT | 491 | QQYESLPLT | 522 |
| BCMA-14 | RASQSVGSNLA | 461 | GASTRAT | 492 | QQYNDWLPV | 523 |
| | | | | | T | |
| BCMA-15 | RASQSIGSSSLA | 462 | GASSRAS | 493 | QQYAGSPPFT | 524 |
| BCMA-16 | KASQDIDDAMN | 463 | SATSPVP | 494 | LQHDNFPLT | 525 |
| BCMA-17 | RASQDIYNNLA | 464 | AANKSQS | 495 | QHYYRFPYS | 526 |
| BCMA-18 | RSSQSLLHSNGY | 452 | LGSNRAS | 484 | MQALQTPYT | 513 |
| | NYLD | | | | | |
| BCMA-19 | GGNNIGTKSVH | 465 | DDSVRPS | 496 | QVWDSDSEH | 527 |
| | | | | | VV | |
| BCMA-20 | SGDGLSKKYVS | 466 | RDKERPS | 497 | QAWDDTTVV | 528 |
| BCMA-21 | RASQGIRNWLA | 467 | AASNLQS | 498 | QKYNSAPFT | 529 |
| BCMA-22 | GGNNIGSKSVH | 468 | GKNNRPS | 499 | SSRDSSGDHL | 530 |
| | | | | | RV | |
| BCMA-23 | QGDSLGNYYAT | 469 | GTNNRPS | 500 | NSRDSSGHHL | 531 |
| | | | | | L | |
| BCMA-24 | RASQSVSSAYLA | 470 | GASTRAT | 492 | QHYGSSFNG | 532 |
| | | | | | SSLFT | |
| BCMA-25 | RASQSVSNSLA | 471 | DASSRAT | 501 | QQFGTSSGLT | 533 |
| BCMA-26 | RASQSVSSSFLA | 472 | GASSRAT | 502 | QQYHSSPSW | 512 |
| | | | | | T | |
| BCMA-27 | RASQSVSTTFLA | 473 | GSSNRAT | 503 | QQYHSSPSW | 512 |
| | | | | | T | |
| BCMA-28 | RASQSISSYLN | 450 | AASSLQS | 482 | QQSYSTPYS | 534 |
| BCMA-29 | RATQSIGSSFLA | 474 | GASQRAT | 504 | QHYESSPSW | 535 |
| | | | | | T | |
| BCMA-30 | RASQSVSSSYLA | 475 | GASSRAT | 502 | QQYGSPPRFT | 536 |
| BCMA-31 | RASQSVSSSYLA | 475 | GASSRAT | 502 | QHYGSSPSW | 537 |
| | | | | | T | |
| BCMA-32 | RASQRVASNYLA | 476 | GASSRAT | 502 | QHYDSSPSW | 538 |
| | | | | | T | |
| BCMA-33 | RASQSLSSNFLA | 477 | GASNWAT | 505 | QYYGTSPMYT | 539 |
| BCMA-34 | RSSQSLLHSNGY | 452 | LGSNRAS | 484 | MQALQTPLT | 540 |
| | NYLD | | | | | |
| BCMA-35 | RASQSVSSSYLA | 475 | GTSSRAT | 506 | QHYGNSPPKF | 541 |
| | | | | | T | |
| BCMA-36 | RASQSVASSFLA | 478 | GASGRAT | 507 | QHYGGSPRLT | 542 |
| BCMA-37 | RASQDVNTAVS | 479 | SASYRYT | 508 | QQHYSTPWT | 543 |
| BCMA-38 | RASESVSVIGAHLI | 480 | LASNLET | 509 | LQSRIFPRT | 544 |
| | H | | | | | |
| BCMA-39 | RASESVTILGSHLI | 481 | LASNVQT | 510 | LQSRTIPRT | 545 |
| | Y | | | | | |
| BCMA-40 | RASESVTILGSHLI | 481 | LASNVQT | 510 | LQSRTIPRT | 545 |
| | Y | | | | | |

TABLE 17E
BCMA Binders-Heavy chain CDR sequences according to Kabat numbering scheme

| | | SEQ | | SEQ | | SEQ |
|---|---|---|---|---|---|---|
| | | ID | | ID | | ID |
| Antibody | CDR-H1 | NO: | CDR-H2 | NO: | CDR-H3 | NO: |
| BCMA-1 | NHGMS | 624 | GIVYSGSTYYAASVK | 639 | HGGESDV | 656 |
| | | | G | | | |
| BCMA-2 | NYAMS | 1073 | GISRSGENTYYADSV | 750 | SPAHYYGGMDV | 722 |
| | | | KG | | | |
| BCMA-3 | DYAMH | 635 | GISWNSGSIGYADSV | 650 | HSFLAY | 723 |
| | | | KG | | | |
| BCMA-4 | NHGMS | 624 | GIVYSGSTYYAASVK | 639 | HGGESDV | 656 |
| | | | G | | | |
| BCMA-5 | NFGIN | 1074 | WINPKNNNTNYAQKF | 751 | GPYYYQSYMDV | 724 |
| | | | QG | | | |
| BCMA-6 | SDAMT | 1075 | VISGSGGTTYYADSV | 752 | LDSSGYYYARGP | 725 |
| | | | KG | | RY | |
| BCMA-7 | NYGIT | 1076 | WISAYNGNTNYAQKF | 753 | GPYYYYMDV | 726 |
| | | | QG | | | |
| BCMA-8 | NHGMS | 624 | GIVYSGSTYYAASVK | 639 | HGGESDV | 656 |
| | | | G | | | |
| BCMA-9 | NHGMS | 624 | GIVYSGSTYYAASVK | 639 | HGGESDV | 656 |
| | | | G | | | |
| BCMA-10 | NHGMS | 624 | GIVYSGSTYYAASVK | 639 | HGGESDV | 656 |
| | | | G | | | |
| BCMA-11 | DYYMS | 628 | YISSSGSTIYYADSVK | 643 | ESGDGMDV | 727 |
| | | | G | | | |
| BCMA-12 | DYYMS | 628 | YISSSGNTIYYADSVK | 754 | STMVREDY | 728 |
| | | | G | | | |
| BCMA-13 | NHGMS | 624 | GIVYSGSTYYAASVK | 639 | HGGESDV | 656 |
| | | | G | | | |
| BCMA-14 | NHGMS | 624 | GIVYSGSTYYAASVK | 639 | HGGESDV | 656 |
| | | | G | | | |
| BCMA-15 | NHGMS | 624 | GIVYSGSTYYAASVK | 639 | HGGESDV | 656 |
| | | | G | | | |
| BCMA-16 | SSYYYW | 625 | SIYYSGSAYYNPSLKS | 640 | HWQEWPDAFDI | 657 |
| | G | | | | | |
| BCMA-17 | TSGMCV | 626 | RIDWDEDKFYSTSLKT | 641 | SGAGGTSATAFDI | 658 |
| | S | | | | | |
| BCMA-18 | SYSMN | 627 | SISSSSSYIYYADSVK | 642 | TIAAVYAFDI | 659 |
| | | | G | | | |
| BCMA-19 | DYYMS | 628 | YISSSGSTIYYADSVK | 643 | DLRGAFDI | 660 |
| | | | G | | | |
| BCMA-20 | SHYIH | 629 | MINPSGGVTAYSQTL | 644 | EGSGSGWYFDF | 661 |
| | | | QG | | | |
| BCMA-21 | SGGYYW | 630 | YIYYSGSTYYNPSLKS | 645 | AGIAARLRGAFDI | 662 |
| | S | | | | | |
| BCMA-22 | SYAIS | 631 | GIIPIFGTANYAQKFQ | 646 | RGGYQLLRWDV | 663 |
| | | | G | | GLLRSAFDI | |
| BCMA-23 | SNSAAW | 632 | RTYYRSKWYSFYAISL | 647 | SSPEGLFLYWFD | 664 |
| | N | | KS | | P | |
| BCMA-24 | SYAMS | 633 | AISGSGGSTYYADSV | 648 | VEGSGSLDY | 665 |
| | | | KG | | | |
| BCMA-25 | RYPMS | 634 | GISDSGVSTYYADSA | 649 | RAGSEASDI | 666 |
| | | | KG | | | |
| BCMA-26 | SYAMS | 633 | AISGSGGSTYYADSV | 648 | ATYKRELRYYYG | 667 |
| | | | KG | | MDV | |
| BCMA-27 | SYAMS | 633 | AISGSGGSTYYADSV | 648 | ATYKRELRYYYG | 667 |
| | | | KG | | MDV | |
| BCMA-28 | DYAMH | 635 | GISWNSGSIGYADSV | 650 | VGKAVPDV | 668 |
| | | | KG | | | |
| BCMA-29 | DYAMH | 635 | SINWKGNSLAYGDSV | 651 | HQGVAYYNYAM | 669 |
| | | | KG | | DV | |
| BCMA-30 | SYAMS | 633 | AISGSGGSTYYADSV | 648 | VVRDGMDV | 670 |
| | | | KG | | | |
| BCMA-31 | SYAMS | 633 | AISGSGGSTYYADSV | 648 | IPQTGTFDY | 671 |
| | | | KG | | | |
| BCMA-32 | SYAMS | 633 | AISGSGGSTYYADSV | 648 | ANYKRELRYYYG | 672 |
| | | | KG | | MDV | |
| BCMA-33 | SYAMS | 633 | AISGSGGSTYYADSV | 648 | ALVGATGAFDI | 673 |
| | | | KG | | | |
| BCMA-34 | SYAMS | 633 | AISGSGGSTYYADSV | 648 | WFGEGFDP | 674 |
| | | | KG | | | |
| BCMA-35 | SYAMS | 633 | AISGSGGSTYYADSV | 648 | VGYDSSGYYRDY | 675 |
| | | | KG | | YGMDV | |
| BCMA-36 | SYAMS | 633 | AISGSGGSTYYADSV | 648 | MGWSSGYLGAF | 676 |
| | | | KG | | DI | |
| BCMA-37 | NFGMN | 636 | WINTYTGESYFADDF | 652 | GEIYYGYDGGFA | 677 |
| | | | KG | | Y | |
| BCMA-38 | DYSIN | 637 | WINTETREPAYAYDF | 653 | DYSYAMDY | 678 |
| | | | RG | | | |
| BCMA-39 | HYSMN | 638 | RINTESGVPIYADDFK | 654 | DYLYSLDF | 679 |
| | | | G | | | |
| BCMA-40 | HYSMN | 638 | RINTETGEPLYADDFK | 655 | DYLYSCDY | 680 |
| | | | G | | | |

TABLE 17F
BCMA Binders-Heavy chain CDR sequences according to Chothia numbering
scheme

| | | SEQ | | SEQ | | SEQ |
|---|---|---|---|---|---|---|
| | | ID | | ID | | ID |
| Antibody | CDR-H1 | NO: | CDR-H2 | NO: | CDR-H3 | NO: |
| BCMA-1 | GFALSNH | 681 | VYSGS | 701 | HGGESDV | 656 |
| BCMA-2 | GFTFSNY | 682 | SRSGEN | 702 | SPAHYYGGMDV | 722 |
| BCMA-3 | GFTFDDY | 683 | SWNSGS | 703 | HSFLAY | 723 |
| BCMA-4 | GFALSNH | 681 | VYSGS | 701 | HGGESDV | 656 |
| BCMA-5 | GYIFDNF | 684 | NPKNNN | 704 | GPYYYQSYMDV | 724 |
| BCMA-6 | GFTFSSD | 685 | SGSGGT | 705 | LDSSGYYYARGPRY | 725 |
| BCMA-7 | GYTFSNY | 686 | SAYNGN | 706 | GPYYYYMDV | 726 |
| BCMA-8 | GFALSNH | 681 | VYSGS | 701 | HGGESDV | 656 |
| BCMA-9 | GFALSNH | 681 | VYSGS | 701 | HGGESDV | 656 |
| BCMA-10 | GFALSNH | 681 | VYSGS | 701 | HGGESDV | 656 |
| BCMA-11 | GFTFSDY | 687 | SSSGST | 707 | ESGDGMDV | 727 |
| BCMA-12 | GFTFSDY | 687 | SSSGNT | 708 | STMVREDY | 728 |
| BCMA-13 | GFALSNH | 681 | VYSGS | 701 | HGGESDV | 656 |
| BCMA-14 | GFALSNH | 681 | VYSGS | 701 | HGGESDV | 656 |
| BCMA-15 | GFALSNH | 681 | VYSGS | 701 | HGGESDV | 656 |
| BCMA-16 | GGSISSS | 688 | YYSGS | 709 | HWQEWPDAFDI | 657 |
| | YY | | | | | |
| BCMA-17 | GFSLRTS | 689 | DWDED | 710 | SGAGGTSATAFDI | 658 |
| | GM | | | | | |
| BCMA-18 | GFTFSSY | 690 | SSSSSY | 711 | TIAAVYAFDI | 659 |
| BCMA-19 | GFTFSDY | 687 | SSSGST | 707 | DLRGAFDI | 660 |
| BCMA-20 | GYTVTSH | 691 | NPSGGV | 712 | EGSGSGWYFDF | 661 |
| BCMA-21 | GGSISSG | 692 | YYSGS | 709 | AGIAARLRGAFDI | 662 |
| | GY | | | | | |
| BCMA-22 | GGTFSSY | 693 | IPIFGT | 713 | RGGYQLLRWDVGLLRS | 663 |
| | | | | | AFDI | |
| BCMA-23 | GDSVSS | 694 | YYRSKWY | 714 | SSPEGLFLYWFDP | 664 |
| | NSA | | | | | |
| BCMA-24 | GFTFSSY | 690 | SGSGGS | 715 | VEGSGSLDY | 665 |
| BCMA-25 | GITFSRY | 695 | SDSGVS | 716 | RAGSEASDI | 666 |
| BCMA-26 | GFTFSSY | 690 | SGSGGS | 715 | ATYKRELRYYYGMDV | 667 |
| BCMA-27 | GFTFSSY | 690 | SGSGGS | 715 | ATYKRELRYYYGMDV | 667 |
| BCMA-28 | GFTFDDY | 683 | SWNSGS | 703 | VGKAVPDV | 668 |
| BCMA-29 | GFTFDDY | 683 | NWKGNS | 717 | HQGVAYYNYAMDV | 669 |
| BCMA-30 | GFTFSSY | 690 | SGSGGS | 715 | VVRDGMDV | 670 |
| BCMA-31 | GFTFSSY | 690 | SGSGGS | 715 | IPQTGTFDY | 671 |
| BCMA-32 | GFTFSSY | 690 | SGSGGS | 715 | ANYKRELRYYYGMDV | 672 |
| BCMA-33 | GFSFSSY | 696 | SGSGGS | 715 | ALVGATGAFDI | 673 |
| BCMA-34 | GFTFSSY | 690 | SGSGGS | 715 | WFGEGFDP | 674 |
| BCMA-35 | GFTFSSY | 690 | SGSGGS | 715 | VGYDSSGYYRDYYGMD | 675 |
| | | | | | V | |
| BCMA-36 | GFTFSSY | 690 | SGSGGS | 715 | MGWSSGYLGAFDI | 676 |
| BCMA-37 | GYTFTNF | 697 | NTYTGE | 718 | GEIYYGYDGGFAY | 677 |
| BCMA-38 | GYTFTDY | 698 | NTETRE | 719 | DYSYAMDY | 678 |
| BCMA-39 | GYTFRHY | 699 | NTESGV | 720 | DYLYSLDF | 679 |
| BCMA-40 | GYTFTHY | 700 | NTETGE | 721 | DYLYSCDY | 680 |

TABLE 17G
BCMA Binders-Heavy chain CDR sequences according to combination of Kabat and
Chothia numbering schemes

| | | SEQ | | SEQ | | SEQ |
|---|---|---|---|---|---|---|
| | | ID | | ID | | ID |
| Antibody | CDR-H1 | NO: | CDR-H2 | NO: | CDR-H3 | NO: |
| BCMA-1 | GFALSNHG | 729 | GIVYSGSTYYAAS | 639 | HGGESDV | 656 |
| | MS | | VKG | | | |
| BCMA-2 | GFTFSNYA | 730 | GISRSGENTYYA | 750 | SPAHYYGGMDV | 722 |
| | MS | | DSVKG | | | |
| BCMA-3 | GFTFDDYA | 731 | GISWNSGSIGYA | 650 | HSFLAY | 723 |
| | MH | | DSVKG | | | |
| BCMA-4 | GFALSNHG | 729 | GIVYSGSTYYAAS | 639 | HGGESDV | 656 |
| | MS | | VKG | | | |
| BCMA-5 | GYIFDNFGI | 732 | WINPKNNNTNYA | 751 | GPYYYQSYMDV | 724 |
| | N | | QKFQG | | | |
| BCMA-6 | GFTFSSDA | 733 | VISGSGGTTYYA | 752 | LDSSGYYYARGPR | 725 |
| | MT | | DSVKG | | Y | |
| BCMA-7 | GYTFSNYG | 734 | WISAYNGNTNYA | 753 | GPYYYYMDV | 726 |
| | IT | | QKFQG | | | |
| BCMA-8 | GFALSNHG | 729 | GIVYSGSTYYAAS | 639 | HGGESDV | 656 |
| | MS | | VKG | | | |
| BCMA-9 | GFALSNHG | 729 | GIVYSGSTYYAAS | 639 | HGGESDV | 656 |
| | MS | | VKG | | | |
| BCMA-10 | GFALSNHG | 729 | GIVYSGSTYYAAS | 639 | HGGESDV | 656 |
| | MS | | VKG | | | |
| BCMA-11 | GFTFSDYY | 735 | YISSSGSTIYYAD | 643 | ESGDGMDV | 727 |
| | MS | | SVKG | | | |
| BCMA-12 | GFTFSDYY | 735 | YISSSGNTIYYAD | 754 | STMVREDY | 728 |
| | MS | | SVKG | | | |
| BCMA-13 | GFALSNHG | 729 | GIVYSGSTYYAAS | 639 | HGGESDV | 656 |
| | MS | | VKG | | | |
| BCMA-14 | GFALSNHG | 729 | GIVYSGSTYYAAS | 639 | HGGESDV | 656 |
| | MS | | VKG | | | |
| BCMA-15 | GFALSNHG | 729 | GIVYSGSTYYAAS | 639 | HGGESDV | 656 |
| | MS | | VKG | | | |
| BCMA-16 | GGSISSSY | 736 | SIYYSGSAYYNPS | 640 | HWQEWPDAFDI | 657 |
| | YYWG | | LKS | | | |
| BCMA-17 | GFSLRTSG | 737 | RIDWDEDKFYST | 641 | SGAGGTSATAFDI | 658 |
| | MCVS | | SLKT | | | |
| BCMA-18 | GFTFSSYS | 738 | SISSSSSYIYYAD | 642 | TIAAVYAFDI | 659 |
| | MN | | SVKG | | | |
| BCMA-19 | GFTFSDYY | 735 | YISSSGSTIYYAD | 643 | DLRGAFDI | 660 |
| | MS | | SVKG | | | |
| BCMA-20 | GYTVTSHY | 739 | MINPSGGVTAYS | 644 | EGSGSGWYFDF | 661 |
| | IH | | QTLQG | | | |
| BCMA-21 | GGSISSGG | 740 | YIYYSGSTYYNPS | 645 | AGIAARLRGAFDI | 662 |
| | YYWS | | LKS | | | |
| BCMA-22 | GGTFSSYA | 741 | GIIPIFGTANYAQK | 646 | RGGYQLLRWDVG | 663 |
| | IS | | FQG | | LLRSAFDI | |
| BCMA-23 | GDSVSSNS | 742 | RTYYRSKWYSFY | 647 | SSPEGLFLYWFDP | 664 |
| | AAWN | | AISLKS | | | |
| BCMA-24 | GFTFSSYA | 743 | AISGSGGSTYYA | 648 | VEGSGSLDY | 665 |
| | MS | | DSVKG | | | |
| BCMA-25 | GITFSRYP | 744 | GISDSGVSTYYA | 649 | RAGSEASDI | 666 |
| | MS | | DSAKG | | | |
| BCMA-26 | GFTFSSYA | 743 | AISGSGGSTYYA | 648 | ATYKRELRYYYGM | 667 |
| | MS | | DSVKG | | DV | |
| BCMA-27 | GFTFSSYA | 743 | AISGSGGSTYYA | 648 | ATYKRELRYYYGM | 667 |
| | MS | | DSVKG | | DV | |
| BCMA-28 | GFTFDDYA | 731 | GISWNSGSIGYA | 650 | VGKAVPDV | 668 |
| | MH | | DSVKG | | | |
| BCMA-29 | GFTFDDYA | 731 | SINWKGNSLAYG | 651 | HQGVAYYNYAMD | 669 |
| | MH | | DSVKG | | V | |
| BCMA-30 | GFTFSSYA | 743 | AISGSGGSTYYA | 648 | VVRDGMDV | 670 |
| | MS | | DSVKG | | | |
| BCMA-31 | GFTFSSYA | 743 | AISGSGGSTYYA | 648 | IPQTGTFDY | 671 |
| | MS | | DSVKG | | | |
| BCMA-32 | GFTFSSYA | 743 | AISGSGGSTYYA | 648 | ANYKRELRYYYG | 672 |
| | MS | | DSVKG | | MDV | |
| BCMA-33 | GFSFSSYA | 745 | AISGSGGSTYYA | 648 | ALVGATGAFDI | 673 |
| | MS | | DSVKG | | | |
| BCMA-34 | GFTFSSYA | 743 | AISGSGGSTYYA | 648 | WFGEGFDP | 674 |
| | MS | | DSVKG | | | |
| BCMA-35 | GFTFSSYA | 743 | AISGSGGSTYYA | 648 | VGYDSSGYYRDY | 675 |
| | MS | | DSVKG | | YGMDV | |
| BCMA-36 | GFTFSSYA | 743 | AISGSGGSTYYA | 648 | MGWSSGYLGAFDI | 676 |
| | MS | | DSVKG | | | |
| BCMA-37 | GYTFTNFG | 746 | WINTYTGESYFA | 652 | GEIYYGYDGGFAY | 677 |
| | MN | | DDFKG | | | |
| BCMA-38 | GYTFTDYS | 747 | WINTETREPAYA | 653 | DYSYAMDY | 678 |
| | IN | | YDFRG | | | |
| BCMA-39 | GYTFRHYS | 748 | RINTESGVPIYAD | 654 | DYLYSLDF | 679 |
| | MN | | DFKG | | | |
| BCMA-40 | GYTFTHYS | 749 | RINTETGEPLYAD | 655 | DYLYSCDY | 680 |
| | MN | | DFKG | | | |

[0601] In some embodiments, the ABM comprises the CDR sequences of BCMA-1. In some embodiments, the ABM comprises the CDR sequences of BCMA-2. In some embodiments, the ABM comprises the CDR sequences of BCMA-3. In some embodiments, the ABM comprises the CDR sequences of BCMA-4. In some embodiments, the ABM comprises the CDR sequences of BCMA-5. In some embodiments, the ABM comprises the CDR sequences of BCMA-6. In some embodiments, the ABM comprises the CDR sequences of BCMA-7. In some embodiments, the ABM comprises the CDR sequences of BCMA-8. In some embodiments, the ABM comprises the CDR sequences of BCMA-9. In some embodiments, the ABM comprises the CDR sequences of BCMA-10. In some embodiments, the ABM comprises the CDR sequences of BCMA-11. In some embodiments, the ABM comprises the CDR sequences of BCMA-12. In some embodiments, the ABM comprises the CDR sequences of BCMA-13. In some embodiments, the ABM comprises the CDR sequences of BCMA-14. In some embodiments, the ABM comprises the CDR sequences of BCMA-15. In some embodiments, the ABM comprises the CDR sequences of BCMA-16. In some embodiments, the ABM comprises the CDR sequences of BCMA-17. In some embodiments, the ABM comprises the CDR sequences of BCMA-18. In some embodiments, the ABM comprises the CDR sequences of BCMA-19. In some embodiments, the ABM comprises the CDR sequences of BCMA-20. In some embodiments, the ABM comprises the CDR sequences of BCMA-21. In some embodiments, the ABM comprises the CDR sequences of BCMA-22. In some embodiments, the ABM comprises the CDR sequences of BCMA-23. In some embodiments, the ABM comprises the CDR sequences of BCMA-24. In some embodiments, the ABM comprises the CDR sequences of BCMA-25. In some embodiments, the ABM comprises the CDR sequences of BCMA-26. In some embodiments, the ABM comprises the CDR sequences of BCMA-27. In some embodiments, the ABM comprises the CDR sequences of BCMA-28. In some embodiments, the ABM comprises the CDR sequences of BCMA-29. In some embodiments, the ABM comprises the CDR sequences of BCMA-30. In some embodiments, the ABM comprises the CDR sequences of BCMA-31. In some embodiments, the ABM comprises the CDR sequences of BCMA-32. In some embodiments, the ABM comprises the CDR sequences of BCMA-33. In some embodiments, the ABM comprises the CDR sequences of BCMA-34. In some embodiments, the ABM comprises the CDR sequences of BCMA-35. In some embodiments, the ABM comprises the CDR sequences of BCMA-36. In some embodiments, the ABM comprises the CDR sequences of BCMA-37. In some embodiments, the ABM comprises the CDR sequences of BCMA-38. In some embodiments, the ABM comprises the CDR sequences of BCMA-39. In some embodiments, the ABM comprises the CDR sequences of BCMA-40.

[0602] In some embodiments, the CDRs are defined by Kabat numbering, as set forth in Tables 17B and 17E. In other embodiments, the CDRs are defined by Chothia numbering, as set forth in Tables 17C and 17F. In yet other embodiments, the CDRs are defined by a combination of Kabat and Chothia numbering, as set forth in Tables 17D and 17G.

[0603] In some embodiments, the Type 2 TBMs in which ABM3 binds to BCMA can comprise the heavy and light chain variable sequences of any of BCMA-1 to BCMA-40.

[0604] In some embodiments, the ABM comprises the heavy and light chain variable sequences of BCMA-1, as set forth in Table 17A. In some embodiments, the ABM comprises the heavy and light chain variable sequences of BCMA-2, as set forth in Table 17A. In some embodiments, the ABM comprises the heavy and light chain variable sequences of BCMA-3, as set forth in Table 17A. In some embodiments, the ABM comprises the heavy and light chain variable sequences of BCMA-4, as set forth in Table 17A. In some embodiments, the ABM comprises the heavy and light chain variable sequences of BCMA-5, as set forth in Table 17A. In some embodiments, the ABM comprises the heavy and light chain variable sequences of BCMA-6, as set forth in Table 17A. In some embodiments, the ABM comprises the heavy and light chain variable sequences of BCMA-7, as set forth in Table 17A. In some embodiments, the ABM comprises the heavy and light chain variable sequences of BCMA-8, as set forth in Table 17A. In some embodiments, the ABM comprises the heavy and light chain variable sequences of BCMA-9, as set forth in Table 17A. In some embodiments, the ABM comprises the heavy and light chain variable sequences of BCMA-10, as set forth in Table 17A. In some embodiments, the ABM comprises the heavy and light chain variable sequences of BCMA-11, as set forth in Table 17A. In some embodiments, the ABM comprises the heavy and light chain variable sequences of BCMA-12, as set forth in Table 17A. In some embodiments, the ABM comprises the heavy and light chain variable sequences of BCMA-13, as set forth in Table 17A. In some embodiments, the ABM comprises the heavy and light chain variable sequences of BCMA-14, as set forth in Table 17A. In some embodiments, the ABM comprises the heavy and light chain variable sequences of BCMA-15, as set forth in Table 17A. In some embodiments, the ABM comprises the heavy and light chain variable sequences of BCMA-16, as set forth in Table 17A. In some embodiments, the ABM comprises the heavy and light chain variable sequences of BCMA-17, as set forth in Table 17A. In some embodiments, the ABM comprises the heavy and light chain variable sequences of BCMA-18, as set forth in Table 17A. In some embodiments, the ABM comprises the heavy and light chain variable sequences of BCMA-19, as set forth in Table 17A. In some embodiments, the ABM comprises the heavy and light chain variable sequences of BCMA-20, as set forth in Table 17A. In some embodiments, the ABM comprises the heavy and light chain variable sequences of BCMA-21, as set forth in Table 17A. In some embodiments, the ABM comprises the heavy and light chain variable sequences of BCMA-22, as set forth in Table 17A. In some embodiments, the ABM comprises the heavy and light chain variable sequences of BCMA-23, as set forth in Table 17A. In some embodiments, the ABM comprises the heavy and light chain variable sequences of BCMA-24, as set forth in Table 17A. In some embodiments, the ABM comprises the heavy and light chain variable sequences of BCMA-25, as set forth in Table 17A. In some embodiments, the ABM comprises the heavy and light chain variable sequences of BCMA-26, as set forth in Table 17A. In some embodiments, the ABM comprises the heavy and light chain variable sequences of BCMA-27, as set forth in Table 17A. In some embodiments, the ABM comprises the heavy and light chain variable sequences of BCMA-28, as set forth in Table 17A. In some embodiments, the ABM comprises the heavy and light chain variable sequences of BCMA-29, as set forth in Table 17A. In some embodiments, the ABM comprises the heavy and light chain variable sequences of BCMA-30, as set forth in Table 17A. In some embodiments, the ABM comprises the heavy and light chain variable sequences of BCMA-31, as set forth in Table 17A. In some embodiments, the ABM comprises the heavy and light chain variable sequences of BCMA-32, as set forth in Table 17A. In some embodiments, the ABM comprises the heavy and light chain variable sequences of BCMA-33, as set forth in Table 17A. In some embodiments, the ABM comprises the heavy and light chain variable sequences of BCMA-34, as set forth in Table 17A. In some embodiments, the ABM comprises the heavy and light chain variable sequences of BCMA-35, as set forth in Table 17A. In some embodiments, the ABM comprises the heavy and light chain variable sequences of BCMA-36, as set forth in Table 17A. In some embodiments, the ABM comprises the heavy and light chain variable sequences of BCMA-37, as set forth in Table 17A. In some embodiments, the ABM comprises the heavy and light chain variable sequences of BCMA-38, as set forth in Table 17A. In some embodiments, the ABM comprises the heavy and light chain variable sequences of BCMA-39, as set forth in Table 17A. In some embodiments, the ABM comprises the heavy and light chain variable sequences of BCMA-40, as set forth in Table 17A.

### 7.10. Nucleic Acids and Host Cells

[0605] In another aspect, the disclosure provides nucleic acids (i.e., polynucleotides) encoding the CD19 binding molecules of the disclosure. In some embodiments, the CD19 binding molecules are encoded by a single nucleic acid. In other embodiments, the CD19 binding molecules are encoded by a plurality of (e.g., two, three, four or more) nucleic acids.

[0606] A single nucleic acid can encode a CD19 binding molecule that comprises a single polypeptide chain, a CD19 binding molecule that comprises two or more polypeptide chains, or a portion of a CD19 binding molecule that comprises more than two polypeptide chains (for example, a single nucleic acid can encode two polypeptide chains of a CD19 binding molecule comprising three, four or more polypeptide chains, or three polypeptide chains of a CD19 binding molecule comprising four or more polypeptide chains). For separate control of expression, the open reading frames encoding two or more polypeptide chains can be under the control of separate transcriptional regulatory elements (e.g., promoters and/or enhancers). The open reading frames encoding two or more polypeptides can also be controlled by the same transcriptional regulatory elements, and separated by internal ribosome entry site (IRES) sequences allowing for translation into separate polypeptides.

[0607] In some embodiments, a CD19 binding molecule comprising two or more polypeptide chains is encoded by two or more nucleic acids. The number of nucleic acids encoding a CD19 binding molecule can be equal to or less than the number of polypeptide chains in the CD19 binding molecule (for example, when more than one polypeptide chains are encoded by a single nucleic acid).

[0608] The nucleic acids can be DNA or RNA (e.g., mRNA).

[0609] In another aspect, the disclosure provides host cells and vectors containing the nucleic acids of the disclosure. The nucleic acids can be present in a single vector or separate vectors present in the same host cell or separate host cell, as described in more detail herein below.

[0610] 7.10.1. Vectors

[0611] The disclosure provides vectors comprising nucleotide sequences encoding a CD19 binding molecule or a CD19 binding molecule component described herein. In one embodiment, the vectors comprise nucleotides encoding an immunoglobulin-based ABM described herein. In one embodiment, the vectors comprise nucleotides encoding an Fc domain described herein. In one embodiment, the vectors comprise nucleotides encoding a recombinant non-immunoglobulin based ABM described herein. A vector can encode one or more ABMs, one or more Fc domains, one or more non-immunoglobulin based ABM, or any combination thereof (e.g., when multiple components or sub-components are encoded as a single polypeptide chain). In one embodiment, the vectors comprise the nucleotide sequences described herein. The vectors include, but are not limited to, a virus, plasmid, cosmid, lambda phage or a yeast artificial chromosome (YAC).

[0612] Numerous vector systems can be employed. For example, one class of vectors utilizes DNA elements which are derived from animal viruses such as, for example, bovine papilloma virus, polyoma virus, adenovirus, vaccinia virus, baculovirus, retroviruses (Rous Sarcoma Virus, MMTV or MOMLV) or SV40 virus. Another class of vectors utilizes RNA elements derived from RNA viruses such as Semliki Forest virus, Eastern Equine Encephalitis virus and Flaviviruses.

[0613] Additionally, cells which have stably integrated the DNA into their chromosomes can be selected by introducing one or more markers which allow for the selection of transfected host cells. The marker can provide, for example, prototropy to an auxotrophic host, biocide resistance (e.g., antibiotics), or resistance to heavy metals such as copper, or the like. The selectable marker gene can be either directly linked to the DNA sequences to be expressed, or introduced into the same cell by cotransformation. Additional elements may also be needed for optimal synthesis of mRNA. These elements can include splice signals, as well as transcriptional promoters, enhancers, and termination signals.

[0614] Once the expression vector or DNA sequence containing the constructs has been prepared for expression, the expression vectors can be transfected or introduced into an appropriate host cell. Various techniques can be employed to achieve this, such as, for example, protoplast fusion, calcium phosphate precipitation, electroporation, retroviral transduction, viral transfection, gene gun, lipid based transfection or other conventional techniques. Methods and conditions for culturing the resulting transfected cells and for recovering the expressed polypeptides are known to those skilled in the art, and can be varied or optimized depending upon the specific expression vector and mammalian host cell employed, based upon the present description.

[0615] 7.10.2. Cells

[0616] The disclosure also provides host cells comprising a nucleic acid of the disclosure.

[0617] In one embodiment, the host cells are genetically engineered to comprise one or more nucleic acids described herein.

[0618] In one embodiment, the host cells are genetically engineered by using an expression cassette. The phrase “expression cassette,” refers to nucleotide sequences, which are capable of affecting expression of a gene in hosts compatible with such sequences. Such cassettes can include a promoter, an open reading frame with or without introns, and a termination signal. Additional factors necessary or helpful in effecting expression can also be used, such as, for example, an inducible promoter.

[0619] The disclosure also provides host cells comprising the vectors described herein.

[0620] The cell can be, but is not limited to, a eukaryotic cell, a bacterial cell, an insect cell, or a human cell. Suitable eukaryotic cells include, but are not limited to, Vero cells, HeLa cells, COS cells, CHO cells, HEK293 cells, BHK cells and MDCKII cells. Suitable insect cells include, but are not limited to, Sf9 cells.

[0621] 7.11. CD19 Binding Molecules with Extended In Vivo Half-Life

[0622] The CD19 binding molecules of the disclosure can be modified to have an extended half-life in vivo.

[0623] A variety of strategies can be used to extend the half life of CD19 binding molecules of the disclosure. For example, by chemical linkage to polyethyleneglycol (PEG), reCODE PEG, antibody scaffold, polysialic acid (PSA), hydroxyethyl starch (HES), albumin-binding ligands, and carbohydrate shields; by genetic fusion to proteins binding to serum proteins, such as albumin, IgG, FcRn, and transferring; by coupling (genetically or chemically) to other binding moieties that bind to serum proteins, such as nanobodies, Fabs, DARPins, avimers, affibodies, and anticalins; by genetic fusion to rPEG, albumin, domain of albumin, albumin-binding proteins, and Fc; or by incorporation into nanocarriers, slow release formulations, or medical devices.

[0624] To prolong the serum circulation of CD19 binding molecules in vivo, inert polymer molecules such as high molecular weight PEG can be attached to the CD19 binding molecules with or without a multifunctional linker either through site-specific conjugation of the PEG to the N- or C-terminus of a polypeptide comprising the CD19 binding molecule or via epsilon-amino groups present on lysine residues. To pegylate a CD19 binding molecule, the molecule can be reacted with polyethylene glycol (PEG), such as a reactive ester or aldehyde derivative of PEG, under conditions in which one or more PEG groups become attached to the CD19 binding molecules. The pegylation can be carried out by an acylation reaction or an alkylation reaction with a reactive PEG molecule (or an analogous reactive water-soluble polymer). As used herein, the term “polyethylene glycol” is intended to encompass any one of the forms of PEG that have been used to derivatize other proteins, such as mono (C1-C10)alkoxy- or aryloxy-polyethylene glycol or polyethylene glycol-maleimide. In one embodiment, the CD19 binding molecule to be pegylated is an aglycosylated antibody. Linear or branched polymer derivatization that results in minimal loss of biological activity will be used. The degree of conjugation can be closely monitored by SDS-PAGE and mass spectrometry to ensure proper conjugation of PEG molecules to the antibodies. Unreacted PEG can be separated from antibody-PEG conjugates by size-exclusion or by ion-exchange chromatography. PEG-derivatized antibodies can be tested for binding activity as well as for in vivo efficacy using methods well-known to those of skill in the art, for example, by immunoassays described herein. Methods for pegylating proteins are known and can be applied to CD19 binding molecules of the disclosure. See for example, EP 0154316 by Nishimura et al. and EP 0401384 by Ishikawa et al.

[0625] Other modified pegylation technologies include reconstituting chemically orthogonal directed engineering technology (ReCODE PEG), which incorporates chemically specified side chains into biosynthetic proteins via a reconstituted system that includes tRNA synthetase and tRNA. This technology enables incorporation of more than 30 new amino acids into biosynthetic proteins in E. coli, yeast, and mammalian cells. The tRNA incorporates a normative amino acid any place an amber codon is positioned, converting the amber from a stop codon to one that signals incorporation of the chemically specified amino acid.

[0626] Recombinant pegylation technology (rPEG) can also be used for serum half life extension. This technology involves genetically fusing a 300-0 amino acid unstructured protein tail to an existing pharmaceutical protein. Because the apparent molecular weight of such an unstructured protein chain is about 15-fold larger than its actual molecular weight, the serum half life of the protein is greatly increased. In contrast to traditional PEGylation, which requires chemical conjugation and repurification, the manufacturing process is greatly simplified and the product is homogeneous.

[0627] Polysialytion is another technology, which uses the natural polymer polysialic acid (PSA) to prolong the active life and improve the stability of therapeutic peptides and proteins. PSA is a polymer of sialic acid (a sugar). When used for protein and therapeutic peptide drug delivery, polysialic acid provides a protective microenvironment on conjugation. This increases the active life of the therapeutic protein in the circulation and prevents it from being recognized by the immune system. The PSA polymer is naturally found in the human body. It was adopted by certain bacteria which evolved over millions of years to coat their walls with it. These naturally polysialylated bacteria were then able, by virtue of molecular mimicry, to foil the body's defense system. PSA, nature's ultimate stealth technology, can be easily produced from such bacteria in large quantities and with predetermined physical characteristics. Bacterial PSA is completely non-immunogenic, even when coupled to proteins, as it is chemically identical to PSA in the human body.

[0628] Another technology include the use of hydroxyethyl starch (“HES”) derivatives linked to CD19 binding molecules. HES is a modified natural polymer derived from waxy maize starch and can be metabolized by the body's enzymes. HES solutions are usually administered to substitute deficient blood volume and to improve the rheological properties of the blood. Hesylation of a CD19 binding molecule enables the prolongation of the circulation half-life by increasing the stability of the molecule, as well as by reducing renal clearance, resulting in an increased biological activity. By varying different parameters, such as the molecular weight of HES, a wide range of HES CD19 binding molecule conjugates can be customized.

[0629] CD19 binding molecules having an increased half-life in vivo can also be generated introducing one or more amino acid modifications (i.e., substitutions, insertions or deletions) into an IgG constant domain, or FcRn binding fragment thereof (e.g., an Fc or hinge Fc domain fragment). See, e.g., International Publication No. WO 98/23289; International Publication No. WO 97/34631; and U.S. Pat. No. 6,277,375.

[0630] Furthermore, the CD19 binding molecules can be conjugated to albumin, a domain of albumin, an albumin-binding protein, or an albumin-binding antibody or antibody fragments thereof, in order to make the molecules more stable in vivo or have a longer half life in vivo. The techniques are well-known, see, e.g., International Publication Nos. WO 93/15199, WO 93/15200, and WO 01/77137; and European Patent No. EP 413,622.

[0631] The CD19 binding molecules of the present disclosure can also be fused to one or more human serum albumin (HSA) polypeptides, or a portion thereof. The use of albumin as a component of an albumin fusion protein as a carrier for various proteins has been suggested in WO 93/15199, WO 93/15200, and EP 413 622. The use of N-terminal fragments of HSA for fusions to polypeptides has also been proposed (EP 399 666). Accordingly, by genetically or chemically fusing or conjugating the molecules to albumin, can stabilize or extend the shelf-life, and/or to retain the molecule's activity for extended periods of time in solution, in vitro and/or in vivo. Additional methods pertaining to HSA fusions can be found, for example, in WO 2001077137 and WO 200306007. In an embodiment, the expression of the fusion protein is performed in mammalian cell lines, for example, CHO cell lines.

[0632] The CD19 binding molecules of the present disclosure can also be fused to an antibody or antibody fragment thereof that binds to albumin, e.g., human serum albumin (HSA). The albumin-binding antibody or antibody fragment thereof can be a Fab, a scFv, a Fv, an scFab, a (Fab′)2, a single domain antibody, a camelid VHH domain, a VH or VL domain, or a full-length monoclonal antibody (mAb).

[0633] The CD19 binding molecules of the present disclosure can also be fused to a fatty acid to extend their half-life. Fatty acids suitable for linking to a biomolecule have been described in the art, e.g., V02015/200078, V02015/191781, US2013/0040884. Suitable half-life extending fatty acids include those defined as a C6-70alkyl, a C6-70alkenyl or a C6-70alkynyl chain, each of which is substituted with at least one carboxylic acid (for example 1, 2, 3 or 4 CO2H) and optionally further substituted with hydroxyl group. For example, the CD19 binding molecules described herein can be linked to a fatty acid having any of the following Formulae A1, A2 or A3:

[chemical structure]

[0634] R¹ is CO₂H or H;
[0635] R², R³ and R⁴ are independently of each other H, OH, CO₂H, —CH═CH₂ or —C≡CH;
[0636] Ak is a branched C₆-C₃₀ alkylene;
[0637] n, m and p are independently of each other an integer between 6 and 30; or an amide, ester or pharmaceutically acceptable salt thereof.

[0638] In some embodiments, the fatty acid is of Formula A1, e.g., a fatty acid of Formula A1 where n and m are independently 8 to 20, e.g., 10 to 16. In another embodiment, the fatty acid moiety is of Formula A1 and where at least one of R² and R³ is CO₂H.

[0639] In some embodiments, the fatty acid is selected from the following Formulae:

[chemical structure]

[0640] where Ak³, Ak⁴, Ak⁵, Ak⁶ and Ak⁷ are independently a (C₈₋₂₀)alkylene, R⁵ and R⁶ are independently (C₈₋₂₀)alkyl.

[0641] In some embodiments, the fatty acid is selected from the following Formulae:

[chemical structure]

[chemical structure]

[0642] In some embodiments, the fatty acid is selected from the following Formulae:

[chemical structure]

[0643] In some embodiments, the fatty acid is of Formula A2 or A3. In a particular embodiment, the conjugate comprises a fatty acid moiety of Formula A2 where p is 8 to 20, or a fatty acid moiety of Formula A3 where Ak is C₈₋₂₀alkylene.

### 7.12. Antibody-Drug Conjugates

[0644] The CD19 binding molecules of the disclosure can be conjugated, e.g., via a linker, to a drug moiety. Such conjugates are referred to herein as antibody-drug conjugates (or “ADCs”) for convenience, notwithstanding the fact that one or more of the ABMs might be based on non-immunoglobulin scaffolds, e.g., a MBM comprising one or more non-immunoglobulin based ABMs, such as a TCR ABM comprising Affilin-144160).

[0645] In certain aspects, the drug moiety exerts a cytotoxic or cytostatic activity. In one embodiment, the drug moiety is chosen from a maytansinoid, a kinesin-like protein KIF11 inhibitor, a V-ATPase (vacuolar-type H+-ATPase) inhibitor, a pro-apoptotic agent, a Bcl2 (B-cell lymphoma 2) inhibitor, an MCL1 (myeloid cell leukemia 1) inhibitor, a HSP90 (heat shock protein 90) inhibitor, an IAP (inhibitor of apoptosis) inhibitor, an mTOR (mechanistic target of rapamycin) inhibitor, a microtubule stabilizer, a microtubule destabilizer, an auristatin, a dolastatin, a MetAP (methionine aminopeptidase), a CRM1 (chromosomal maintenance 1) inhibitor, a DPPIV (dipeptidyl peptidase IV) inhibitor, a proteasome inhibitor, an inhibitor of a phosphoryl transfer reaction in mitochondria, a protein synthesis inhibitor, a kinase inhibitor, a CDK2 (cyclin-dependent kinase 2) inhibitor, a CDK9 (cyclin-dependent kinase 9) inhibitor, a kinesin inhibitor, an HDAC (histone deacetylase) inhibitor, a DNA damaging agent, a DNA alkylating agent, a DNA intercalator, a DNA minor groove binder, a RNA polymerase inhibitor, a topoisomerase inhibitor, or a DHFR (dihydrofolate reductase) inhibitor. In some embodiments, the drug moiety is a radioactive metal ion, such as alpha-emitters such as 213Bi or macrocyclic chelators useful for conjugating radiometal ions, including but not limited to, 131In, 131LU, 131Y, 131Ho, 131Sm, to polypeptides. In one embodiment, the macrocyclic chelator is 1,4,7,10-tetraazacyclododecane-N,N′,N″,N′″-tetraacetic acid (DOTA).

[0646] In one embodiment, the linker is chosen from a cleavable linker, a non-cleavable linker, a hydrophilic linker, a procharged linker, or a dicarboxylic acid based linker.

[0647] In some embodiments, the ADCs are compounds according to structural formula (1):

[D-L-XY]ₙ-Ab

or salts thereof, where each “D” represents, independently of the others, a cytotoxic and/or cytostatic agent (“drug”); each “L” represents, independently of the others, a linker; “Ab” represents a CD19 binding molecule described herein; each “XY” represents a linkage formed between a functional group R^{x} on the linker and a “complementary” functional group Ry on the antibody, and n represents the number of drugs linked to, or drug-to-antibody ratio (DAR), of the ADC.

[0648] Some embodiments of the various antibodies (Ab) that can comprise the ADCs include the various embodiments of CD19 binding molecules described above.

[0649] In some embodiments of the ADCs and/or salts of structural formula (1), each D is the same and/or each L is the same.

[0650] Cytotoxic and/or cytostatic agents used in the conjugates of the disclosure can be any agents known to inhibit the growth and/or replication of and/or kill cells, and in particular cancer and/or tumor cells. Numerous agents having cytotoxic and/or cytostatic properties are known in the literature. Non-limiting examples of classes of cytotoxic and/or cytostatic agents include, by way of example and not limitation, radionuclides, alkylating agents, topoisomerase I inhibitors, topoisomerase II inhibitors, DNA intercalating agents (e.g., groove binding agents such as minor groove binders), RNA/DNA antimetabolites, cell cycle modulators, kinase inhibitors, protein synthesis inhibitors, histone deacetylase inhibitors, mitochondria inhibitors, and antimitotic agents.

### 7.13. CD19 Binding Molecules Conjugated to Detectable Agents

[0651] CD19 binding molecules of the disclosure can be conjugated to a diagnostic or detectable agent Such molecules can be useful for monitoring or prognosing the onset, development, progression and/or severity of a disease or disorder as part of a clinical testing procedure, such as determining the efficacy of a particular therapy. Such diagnosis and detection can accomplished by coupling the CD19 binding molecules to detectable substances including, but not limited to, various enzymes, such as, but not limited to, horseradish peroxidase, alkaline phosphatase, beta-galactosidase, or acetylcholinesterase; prosthetic groups, such as, but not limited to, streptavidin/biotin and avidin/biotin; fluorescent materials, such as, but not limited to, umbelliferone, fluorescein, fluorescein isothiocynate, rhodamine, dichlorotriazinylamine fluorescein, dansyl chloride or phycoerythrin; luminescent materials, such as, but not limited to, luminol; bioluminescent materials, such as but not limited to, luciferase, luciferin, and aequorin; radioactive materials, such as, but not limited to, iodine (¹³¹I, ¹²⁵I, ¹²³I, and ¹²¹I), carbon (¹⁴C), sulfur (³⁵S), tritium (³H), indium (¹¹⁵In, ¹¹³In, ¹¹²In, and ¹¹¹In), technetium (⁹⁹Tc), thallium (²⁰¹Ti), gallium (⁶⁸Ga, ⁶⁷Ga), palladium (¹⁰³Pd), molybdenum (⁹⁹Mo), xenon (¹³³Xe), fluorine (¹⁸F), ¹⁵³Sm, ¹⁷⁷Lu, ¹⁵⁹Gd, ¹⁴⁹Pm, ¹⁴⁰La, ¹⁷⁵Yb, ¹⁶⁶Ho, ⁹⁰Y, 47Sc, ¹⁸⁶Re, ¹⁸⁸Re, ¹⁴²Pr, ¹⁰⁵Rh, ⁹⁷Ru, ⁶⁸Ge, ⁵⁷Co, ⁶⁵Zn, ⁸⁵Sr, ³²P, ¹⁵³Gd, ¹⁶⁹Yb, ⁵¹Cr, ⁵⁴Mn, ⁷⁵Se, ¹¹³Sn, and ¹¹⁷Tin; and positron emitting metals using various positron emission tomographies, and nonradioactive paramagnetic metal ions.

### 7.14. CD19 Binding Molecules Attached to Solid Supports

[0652] The CD19 binding molecules can also be attached to solid supports, which are particularly useful for immunoassays or purification of the target antigen(s). Such solid supports include, but are not limited to, glass, cellulose, polyacrylamide, nylon, polystyrene, polyvinyl chloride or polypropylene.

### 7.15. Pharmaceutical Compositions

[0653] The CD19 binding molecules of the disclosure (as well as their conjugates; references to CD19 binding molecules in this disclosure also refers to conjugates comprising the CD19 binding molecules, such as ADCs, unless the context dictates otherwise) can be formulated as pharmaceutical compositions comprising the CD19 binding molecules, for example containing one or more pharmaceutically acceptable excipients or carriers. To prepare pharmaceutical or sterile compositions comprising the CD19 binding molecules of the present disclosure a CD19 binding molecule preparation can be combined with one or more pharmaceutically acceptable excipient or carrier.

[0654] For example, formulations of CD19 binding molecules can be prepared by mixing CD19 binding molecules with physiologically acceptable carriers, excipients, or stabilizers in the form of, e.g., lyophilized powders, slurries, aqueous solutions, lotions, or suspensions (see, e.g., Hardman et al., 2001, Goodman and Gilman's The Pharmacological Basis of Therapeutics, McGraw-Hill, New York, N.Y.; Gennaro, 2000, Remington: The Science and Practice of Pharmacy, Lippincott, Williams, and Wilkins, New York, N.Y.; Avis, et al. (eds.),1993, Pharmaceutical Dosage Forms: General Medications, Marcel Dekker, NY; Lieberman, et al. (eds.), 1990, Pharmaceutical Dosage Forms: Tablets, Marcel Dekker, NY; Lieberman, et al. (eds.), 1990, Pharmaceutical Dosage Forms: Disperse Systems, Marcel Dekker, NY; Weiner and Kotkoskie, 2000, Excipient Toxicity and Safety, Marcel Dekker, Inc., New York, N.Y.).

[0655] Selecting an administration regimen for a CD19 binding molecule depends on several factors, including the serum or tissue turnover rate of the CD19 binding molecule, the level of symptoms, the immunogenicity of the CD19 binding molecule, and the accessibility of the target cells. In certain embodiments, an administration regimen maximizes the amount of CD19 binding molecule delivered to the subject consistent with an acceptable level of side effects. Accordingly, the amount of CD19 binding molecule delivered depends in part on the particular CD19 binding molecule and the severity of the condition being treated. Guidance in selecting appropriate doses of antibodies and small molecules are available (see, e.g., Wawrzynczak, 1996, Antibody Therapy, Bios Scientific Pub. Ltd, Oxfordshire, UK; Kresina (ed.), 1991, Monoclonal Antibodies, Cytokines and Arthritis, Marcel Dekker, New York, N.Y.; Bach (ed.), 1993, Monoclonal Antibodies and Peptide Therapy in Autoimmune Diseases, Marcel Dekker, New York, N.Y.; Baert et al., 2003, New Engl. J. Med. 348:601-608; Milgrom et al., 1999, New Engl. J. Med. 341:1966-1973; Slamon et al., 2001, New Engl. J. Med. 344:783-792; Beniaminovitz et al., 2000, New Engl. J. Med. 342:613-619; Ghosh et al., 2003, New Engl. J. Med. 348:24-32; Lipsky et al., 2000, New Engl. J. Med. 343:1594-1602).

[0656] Determination of the appropriate dose is made by the clinician, e.g., using parameters or factors known or suspected in the art to affect treatment or predicted to affect treatment. Generally, the dose begins with an amount somewhat less than the optimum dose and it is increased by small increments thereafter until the desired or optimum effect is achieved relative to any negative side effects. Important diagnostic measures include those of symptoms of, e.g., the inflammation or level of inflammatory cytokines produced.

[0657] Actual dosage levels of the CD19 binding molecules in the pharmaceutical compositions of the present disclosure can be varied so as to obtain an amount of the CD19 binding molecule which is effective to achieve the desired therapeutic response for a particular subject, composition, and mode of administration, without being toxic to the subject. The selected dosage level will depend upon a variety of pharmacokinetic factors including the activity of the particular CD19 binding molecule, the route of administration, the time of administration, the rate of excretion of the particular CD19 binding molecule being employed, the duration of the treatment, other agents (e.g., active agents such as therapeutic drugs or compounds and/or inert materials used as carriers) in combination with the particular CD19 binding molecule employed, the age, sex, weight, condition, general health and prior medical history of the subject being treated, and like factors known in the medical arts.

[0658] Compositions comprising the CD19 binding molecules can be provided by continuous infusion, or by doses at intervals of, e.g., one day, one week, or 1-7 times per week. Doses can be provided intravenously, subcutaneously, topically, orally, nasally, rectally, intramuscular, intracerebrally, or by inhalation. A specific dose protocol is one involving the maximal dose or dose frequency that avoids significant undesirable side effects.

[0659] An effective amount for a particular subject can vary depending on factors such as the condition being treated, the overall health of the subject, the method route and dose of administration and the severity of side effects (see, e.g., Maynard, et al. (1996) A Handbook of SOPs for Good Clinical Practice, Interpharm Press, Boca Raton, Fla.; Dent (2001) Good Laboratory and Good Clinical Practice, Urch Publ., London, UK).

[0660] The route of administration can be by, e.g., topical or cutaneous application, injection or infusion by intravenous, intraperitoneal, intracerebral, intramuscular, intraocular, intraarterial, intracerebrospinal, intralesional, or by sustained release systems or an implant (see, e.g., Sidman et al., 1983, Biopolymers 22:547-556; Langer et al., 1981, J. Biomed. Mater. Res. 15:167-277; Langer, 1982, Chem. Tech. 12:98-105; Epstein et al., 1985, Proc. Natl. Acad. Sci. USA 82:3688-3692; Hwang et al., 1980, Proc. Natl. Acad. Sci. USA 77:4030-4034; U.S. Pat. Nos. 6,350,466 and 6,316,024). Where necessary, the composition can also include a solubilizing agent and a local anesthetic such as lidocaine to ease pain at the site of the injection. In addition, pulmonary administration can also be employed, e.g., by use of an inhaler or nebulizer, and formulation with an aerosolizing agent. See, e.g., U.S. Pat. Nos. 6,019,968, 5,985,320, 5,985,309, 5,934,272, 5,874,064, 5,855,913, 5,290,540, and 4,880,078; and PCT Publication Nos. WO 92/19244, WO 97/32572, WO 97/44013, WO 98/31346, and WO 99/66903.

[0661] A composition of the present disclosure can also be administered via one or more routes of administration using one or more of a variety of known methods. As will be appreciated by a skilled artisan, the route and/or mode of administration will vary depending upon the desired results. Selected routes of administration for CD19 binding molecules include intravenous, intramuscular, intradermal, intraperitoneal, subcutaneous, spinal or other general routes of administration, for example by injection or infusion. General administration can represent modes of administration other than enteral and topical administration, usually by injection, and includes, without limitation, intravenous, intramuscular, intraarterial, intrathecal, intracapsular, intraorbital, intracardiac, intradermal, intraperitoneal, transtracheal, subcutaneous, subcuticular, intraarticular, subcapsular, subarachnoid, intraspinal, epidural and intrasternal injection and infusion. Alternatively, a composition of the disclosure can be administered via a non-general route, such as a topical, epidermal or mucosal route of administration, for example, intranasally, orally, vaginally, rectally, sublingually or topically. In one embodiment, the CD19 binding molecule is administered by infusion. In another embodiment, the CD19 binding molecule is administered subcutaneously.

[0662] If the CD19 binding molecules are administered in a controlled release or sustained release system, a pump can be used to achieve controlled or sustained release (see Langer, supra; Sefton, 1987, CRC Crit. Ref Biomed. Eng. 14:20; Buchwald et al., 1980, Surgery 88:507; Saudek et al., 1989, N. Engl. J. Med. 321:574). Polymeric materials can be used to achieve controlled or sustained release of the therapies of the disclosure (see, e.g., Medical Applications of Controlled Release, Langer and Wise (eds.), CRC Pres., Boca Raton, Fla. (1974); Controlled Drug Bioavailability, Drug Product Design and Performance, Smolen and Ball (eds.), Wiley, New York (1984); Ranger and Peppas, 1983, J., Macromol. Sci. Rev. Macromol. Chem. 23:61; see also Levy et al., 1985, Science 228:190; During et al., 1989, Ann. Neurol. 25:351; Howard et al., 1989, J. Neurosurg. 71:105); U.S. Pat. Nos. 5,679,377; 5,916,597; 5,912,015; 5,989,463; 5,128,326; PCT Publication No. WO 99/15154; and PCT Publication No. WO 99/20253. Examples of polymers used in sustained release formulations include, but are not limited to, poly(2-hydroxy ethyl methacrylate), poly(methyl methacrylate), poly(acrylic acid), poly(ethylene-co-vinyl acetate), poly(methacrylic acid), polyglycolides (PLG), polyanhydrides, poly(N-vinyl pyrrolidone), poly(vinyl alcohol), polyacrylamide, poly(ethylene glycol), polylactides (PLA), poly(lactide-co-glycolides) (PLGA), and polyorthoesters. In one embodiment, the polymer used in a sustained release formulation is inert, free of leachable impurities, stable on storage, sterile, and biodegradable. A controlled or sustained release system can be placed in proximity of the prophylactic or therapeutic target, thus requiring only a fraction of the systemic dose (see, e.g., Goodson, in Medical Applications of Controlled Release, supra, vol. 2, pp. 115-138 (1984)).

[0663] Controlled release systems are discussed in the review by Langer (1990, Science 249:1527-1533). Any technique known to one of skill in the art can be used to produce sustained release formulations comprising one or more CD19 binding molecules of the disclosure. See, e.g., U.S. Pat. No. 4,526,938, PCT publication WO 91/05548, PCT publication WO 96/20698, Ning et al., 1996, Radiotherapy & Oncology 39:179-189, Song et al., 1995, PDA Journal of Pharmaceutical Science & Technology 50:372-397, Cleek et al., 1997, Pro. Intl. Symp. Control. Rel. Bioact. Mater. 24:853-854, and Lam et al., 1997, Proc. Int'l. Symp. Control Rel. Bioact. Mater. 24:759-760.

[0664] If the CD19 binding molecules are administered topically, they can be formulated in the form of an ointment, cream, transdermal patch, lotion, gel, shampoo, spray, aerosol, solution, emulsion, or other form well-known to one of skill in the art. See, e.g., Remington's Pharmaceutical Sciences and Introduction to Pharmaceutical Dosage Forms, 19th ed., Mack Pub. Co., Easton, Pa. (1995). For non-sprayable topical dosage forms, viscous to semi-solid or solid forms comprising a carrier or one or more excipients compatible with topical application and having a dynamic viscosity, in some embodiments, greater than water are typically employed. Suitable formulations include, without limitation, solutions, suspensions, emulsions, creams, ointments, powders, liniments, salves, and the like, which are, if desired, sterilized or mixed with auxiliary agents (e.g., preservatives, stabilizers, wetting agents, buffers, or salts) for influencing various properties, such as, for example, osmotic pressure. Other suitable topical dosage forms include sprayable aerosol preparations where the active ingredient, in some embodiments, in combination with a solid or liquid inert carrier, is packaged in a mixture with a pressurized volatile (e.g., a gaseous propellant, such as freon) or in a squeeze bottle. Moisturizers or humectants can also be added to pharmaceutical compositions and dosage forms if desired. Examples of such additional ingredients are well-known.

[0665] If the compositions comprising the CD19 binding molecules are administered intranasally, the CD19 binding molecules can be formulated in an aerosol form, spray, mist or in the form of drops. In particular, prophylactic or therapeutic agents for use according to the present disclosure can be conveniently delivered in the form of an aerosol spray presentation from pressurized packs or a nebulizer, with the use of a suitable propellant (e.g., dichlorodifluoromethane, trichlorofluoromethane, dichlorotetrafluoroethane, carbon dioxide or other suitable gas). In the case of a pressurized aerosol the dosage unit can be determined by providing a valve to deliver a metered amount. Capsules and cartridges (composed of, e.g., gelatin) for use in an inhaler or insufflator can be formulated containing a powder mix of the CD19 binding molecule and a suitable powder base such as lactose or starch.

[0666] The CD19 binding molecules of the disclosure can be administered in combination therapy regimens, as described in Section 7.17, infra.

[0667] In certain embodiments, the CD19 binding molecules can be formulated to ensure proper distribution in vivo. For example, the blood-brain barrier (BBB) excludes many highly hydrophilic compounds. To ensure that the therapeutic compounds of the disclosure cross the BBB (if desired), they can be formulated, for example, in liposomes. For methods of manufacturing liposomes, see, e.g., U.S. Pat. Nos. 4,522,811; 5,374,548; and 5,399,331. The liposomes can comprise one or more moieties which are selectively transported into specific cells or organs, thus enhance targeted drug delivery (see, e.g., Ranade, 1989, J. Clin. Pharmacol. 29:685). Exemplary targeting moieties include folate or biotin (see, e.g., U.S. Pat. No. 5,416,016 to Low et al.); mannosides (Umezawa et al., 1988, Biochem. Biophys. Res. Commun. 153:1038); antibodies (Bloeman et al., 1995, FEBS Lett. 357:140; Owais et al., 1995, Antimicrob. Agents Chemother. 39:180); surfactant protein A receptor (Briscoe et al., 1995, Am. J. Physiol. 1233:134); p 120 (Schreier et al., 1994, J. Biol. Chem. 269:9090); see also Keinanen and Laukkanen, 1994, FEBS Lett. 346:123; Killion and Fidler, 1994, Immunomethods 4:273.

[0668] When used in combination therapy, e.g., as described in Section 7.17, infra, a CD19 binding molecule and one or more additional agents can be administered to a subject in the same pharmaceutical composition. Alternatively, the CD19 binding molecule and the additional agent(s) of the combination therapies can be administered concurrently to a subject in separate pharmaceutical compositions.

[0669] The therapeutic methods described herein can further comprise carrying a “companion diagnostic” test whereby a sample from a subject who is a candidate for therapy with a CD19 binding molecule is tested for the expression of CD19. The companion diagnostic test can be performed prior to initiating therapy with a CD19 binding molecule and/or during a therapeutic regimen with a CD19 binding molecule to monitor the subject's continued suitability for CD19 binding molecule therapy. The agent used in the companion diagnostic can be the CD19 binding molecule itself or another diagnostic agent, for example a labeled monospecific antibody against CD19 or a nucleic acid probe to detect CD19 RNA. The sample that can be tested in a companion diagnostic assay can be any sample in which the cells targeted by the CD19 binding molecule can be present, from example a tumor (e.g., a solid tumor) biopsy, lymph, stool, urine, blood or any other bodily fluid that might contain circulating tumor cells.

### 7.16. Therapeutic Indications

[0670] The CD19 binding molecules of the disclosure can be used in the treatment of any disease associated with CD19 expression. The phrase “disease associated with CD19 expression” includes, but is not limited to, a disease associated with expression of CD19 or condition associated with cells which express CD19 including, e.g., proliferative diseases such as a cancer or malignancy or a precancerous condition such as a myelodysplasia, a myelodysplastic syndrome or a preleukemia; or a noncancer related indication associated with cells which express CD19. In one aspect, a cancer associated with expression of CD19 is a hematological cancer. In one aspect, the hematological cancer is a leukemia or a lymphoma. In one aspect, a cancer associated with expression of CD19 includes cancers and malignancies including, but not limited to, e.g., one or more acute leukemias including but not limited to, e.g., B-cell acute Lymphoid Leukemia (“BALL”), T-cell acute Lymphoid Leukemia (“TALL”), acute lymphoid leukemia (ALL); one or more chronic leukemias including but not limited to, e.g., chronic myelogenous leukemia (CML), Chronic Lymphoid Leukemia (CLL). Additional cancers or hematologic conditions associated with expression of CD19 comprise, but are not limited to, e.g., B cell prolymphocytic leukemia, blastic plasmacytoid dendritic cell neoplasm, Burkitt's lymphoma, diffuse large B cell lymphoma, Follicular lymphoma, Hairy cell leukemia, small cell- or a large cell-follicular lymphoma, malignant lymphoproliferative conditions, MALT lymphoma, mantle cell lymphoma, Marginal zone lymphoma, multiple myeloma, myelodysplasia and myelodysplastic syndrome, non-Hodgkin's lymphoma, plasmablastic lymphoma, plasmacytoid dendritic cell neoplasm, Waldenstrom macroglobulinemia, and “preleukemia” which are a diverse collection of hematological conditions united by ineffective production (or dysplasia) of myeloid blood cells, and the like. Further diseases associated with expression of CD19expression include, but not limited to, e.g., atypical and/or non-classical cancers, malignancies, precancerous conditions or proliferative diseases associated with expression of CD19. Non-cancer related indications associated with expression of CD19 include, but are not limited to, e.g., autoimmune disease, (e.g., lupus), inflammatory disorders (allergy and asthma) and transplantation.

[0671] For example, a CD19 binding molecule can be used to treat a subject who has undergone treatment for a disease associated with elevated expression of CD19, where the subject who has undergone treatment for elevated levels of CD19 exhibits a disease associated with elevated levels of CD19.

[0672] In one aspect, the disclosure provides a method of inhibiting growth of a CD19-expressing tumor cell, comprising contacting the tumor cell with a CD19 binding molecule such that the growth of the tumor cell is inhibited.

[0673] In one aspect, the disclosure provides a method of treating and/or preventing a disease that arises in individuals who are immunocompromised, comprising administering a CD19 binding molecule. In particular, disclosed herein is a method of treating diseases, disorders and conditions associated with expression of CD19, comprising administering a CD19 binding molecule.

[0674] In certain aspects, disclosed herein is a method of treating patients at risk for developing diseases, disorders and conditions associated with expression of CD19, comprising administering a CD19 binding molecule.

[0675] Thus, the present disclosure provides methods for the treatment or prevention of diseases, disorders and conditions associated with expression of CD19 comprising administering to a subject in need thereof, a therapeutically effective amount of a CD19 binding molecule.

[0676] The present disclosure also provides methods for preventing, treating and/or managing a disease associated with CD19-expressing cells (e.g., a hematologic cancer or atypical cancer expressing CD19), the methods comprising administering to a subject in need a CD19 binding molecule. In one aspect, the subject is a human. Non-limiting examples of disorders associated with CD19-expressing cells include viral or fungal infections, and disorders related to mucosal immunity.

[0677] 7.16.1. Cancer and Cancer-Related Diseases and Disorders and Patient Populations

[0678] In one aspect, the disclosure provides a method of treating cancer in a subject. The method comprises administering to the subject a CD19 binding molecule such that the cancer is treated in the subject. An example of a cancer that is treatable by the CD19-targeting agent is a cancer associated with expression of CD19.

[0679] In one aspect, the disclosure provides methods for treating a cancer where part of the tumor is negative for CD19 and part of the tumor is positive for CD19.

[0680] In one aspect, the disclosure provides methods for treating a cancer where CD19 is expressed on both normal cells and cancers cells, but is expressed at lower levels on normal cells, using a CD19 binding molecule of the disclosure. In one embodiment, the method further comprises selecting a CD19 binding molecule that binds with an affinity that allows the CD19 binding molecule to bind and kill the cancer cells expressing CD19 but kill less than 30%, 25%, 20%, 15%, 10%, 5% or less of the normal cells expressing CD19, e.g., as determined by an assay described herein. For example, a killing assay such as flow cytometry based on Cr51 CTL can be used. In one embodiment, the CD19 binding molecule has an antigen binding domain that has a binding affinity K_{D} of 10⁻⁴ M to 10⁻⁸ M, e.g., 10⁻⁵ M to 10⁻⁷ M, e.g., 10⁻⁶ M or 10⁻⁷ M, for CD19.

[0681] In one aspect, disclosed herein is a method of treating a proliferative disease such as a cancer or malignancy or a precancerous condition such as a myelodysplasia, a myelodysplastic syndrome or a preleukemia, comprising administering CD19 binding molecule. In one aspect, the cancer is a hematological cancer. Hematological cancer conditions are the types of cancer such as leukemia and malignant lymphoproliferative conditions that affect blood, bone marrow and the lymphatic system. In one aspect, the hematological cancer is a leukemia. An example of a disease or disorder associated with CD19 is multiple myeloma (also known as MM) (See Claudio et al., Blood. 2002, 100(6):2175-86; and Novak et al., Blood. 2004, 103(2):689-94). Multiple myeloma, also known as plasma cell myeloma or Kahler's disease, is a cancer characterized by an accumulation of abnormal or malignant plasma B-cells in the bone marrow. Frequently, the cancer cells invade adjacent bone, destroying skeletal structures and resulting in bone pain and fractures. Most cases of myeloma also feature the production of a paraprotein (also known as M proteins or myeloma proteins), which is an abnormal immunoglobulin produced in excess by the clonal proliferation of the malignant plasma cells. Blood serum paraprotein levels of more than 30 g/L is diagnostic of multiple myeloma, according to the diagnostic criteria of the International Myeloma Working Group (IMWG) (See Kyle et al. (2009), Leukemia. 23:3-9). Other symptoms or signs of multiple myeloma include reduced kidney function or renal failure, bone lesions, anemia, hypercalcemia, and neurological symptoms.

[0682] Other plasma cell proliferative disorders that can be treated by the compositions and methods described herein include, but are not limited to, asymptomatic myeloma (smoldering multiple myeloma or indolent myeloma), monoclonal gammapathy of undetermined significance (MGUS), Waldenstrom's macroglobulinemia, plasmacytomas (e.g., plasma cell dyscrasia, solitary myeloma, solitary plasmacytoma, extramedullary plasmacytoma, and multiple plasmacytoma), systemic amyloid light chain amyloidosis, and POEMS syndrome (also known as Crow-Fukase syndrome, Takatsuki disease, and PEP syndrome).

[0683] Another example of a disease or disorder associated with CD19 is Hodgkin's lymphoma and non-Hodgkin's lymphoma (See Chiu et al., Blood. 2007, 109(2):729-39; He et al., J Immunol. 2004, 172(5):3268-79).

[0684] Hodgkin's lymphoma (HL), also known as Hodgkin's disease, is a cancer of the lymphatic system that originates from white blood cells, or lymphocytes. The abnormal cells that comprise the lymphoma are called Reed-Sternberg cells. In Hodgkin's lymphoma, the cancer spreads from one lymph node group to another. Hodgkin's lymphoma can be subclassified into four pathologic subtypes based upon Reed-Stenberg cell morphology and the cell composition around the Reed-Sternberg cells (as determined through lymph node biopsy): nodular sclerosing HL, mixed-cellularity subtype, lymphocyte-rich or lymphocytic predominance, lymphocyte depleted. Some Hodgkin's lymphoma can also be nodular lymphocyte predominant Hodgkin's lymphoma, or can be unspecified. Symptoms and signs of Hodgkin's lymphoma include painless swelling in the lymph nodes in the neck, armpits, or groin, fever, night sweats, weight loss, fatigue, itching, or abdominal pain.

[0685] Non-Hodgkin's lymphoma (NHL) comprises a diverse group of blood cancers that include any kind of lymphoma other than Hodgkin's lymphoma. Subtypes of non-Hodgkin's lymphoma are classified primarily by cell morphology, chromosomal aberrations, and surface markers. NHL subtypes (or NHL-associated cancers) include B cell lymphomas such as, but not limited to, Burkitt's lymphoma, B-cell chronic lymphocytic leukemia (B-CLL), B-cell prolymphocytic leukemia (B-PLL), chronic lymphocytic leukemia (CLL), diffuse large B-cell lymphoma (DLBCL) (e.g., intravascular large B-cell lymphoma and primary mediastinal B-cell lymphoma), follicular lymphoma (e.g., follicle center lymphoma, follicular small cleaved cell), hair cell leukemia, high grade B-cell lymphoma (Burkitt's like), lymphoplasmacytic lymphoma (Waldenstrom's macroglublinemia), mantle cell lymphoma, marginal zone B-cell lymphomas (e.g., extranodal marginal zone B-cell lymphoma or mucosa-associated lymphoid tissue (MALT) lymphoma, nodal marginal zone B-cell lymphoma, and splenic marginal zone B-cell lymphoma), plasmacytoma/myeloma, precursor B-lymphoblastic leukemia/lymphoma (PB-LBL/L), primary central nervous system (CNS) lymphoma, primary intraocular lymphoma, small lymphocytic lymphoma (SLL); and T cell lymphomas, such as, but not limited to, anaplastic large cell lymphoma (ALCL), adult T-cell lymphoma/leukemia (e.g., smoldering, chronic, acute and lymphomatous), angiocentric lymphoma, angioimmunoblastic T-cell lymphoma, cutaneous T-cell lymphomas (e.g., mycosis fungoides, Sezary syndrome, etc.), extranodal natural killer/T-cell lymphoma (nasal-type), enteropathy type intestinal T-cell lymphoma, large granular lymphocyte leukemia, precursor T-lymphoblastic lymphoma/leukemia (T-LBL/L), T-cell chronic lymphocytic leukemia/prolymphocytic leukemia (T-CLL/PLL), and unspecified peripheral T-cell lymphoma. Symptoms and signs of Hodgkin's lymphoma include painless swelling in the lymph nodes in the neck, armpits, or groin, fever, night sweats, weight loss, fatigue, itching, abdominal pain, coughing, or chest pain.

[0686] CD19 expression has also been associated with Waldenstrom's macroglobulinemia (WM), also known as lymphoplasmacytic lymphoma (LPL). (See Elsawa et al., Blood. 2006, 107(7):2882-8). Waldenstrom's macroglobulinemia was previously considered to be related to multiple myeloma, but has more recently been classified as a subtype of non-Hodgkin's lymphoma. WM is characterized by uncontrolled B-cell lymphocyte proliferation, resulting in anemia and production of excess amounts of paraprotein, or immunoglobulin M (IgM), which thickens the blood and results in hyperviscosity syndrome. Other symptoms or signs of WM include fever, night sweats, fatigue, anemia, weight loss, lymphadenopathy or splenomegaly, blurred vision, dizziness, nose bleeds, bleeding gums, unusual bruises, renal impairment or failure, amyloidosis, or peripheral neuropathy.

[0687] Another example of a disease or disorder associated with CD19 expression is brain cancer. Specifically, expression of CD19 has been associated with astrocytoma or glioblastoma (See Deshayes et al, Oncogene. 2004, 23(17):3005-12, Pelekanou et al., PLoS One. 2013, 8(12):e83250). Astrocytomas are tumors that arise from astrocytes, which are a type of glial cell in the brain. Glioblastoma (also known as glioblastoma multiforme or GBM) is the most malignant form of astrocytoma, and is considered the most advanced stage of brain cancer (stage IV). There are two variants of glioblastoma: giant cell glioblastoma and gliosarcoma. Other astrocytomas include juvenile pilocytic astrocytoma (JPA), fibrillary astrocytoma, pleomorphic xantroastrocytoma (PXA), desembryoplastic neuroepithelial tumor (DNET), and anaplastic astrocytoma (AA).

[0688] Symptoms or signs associated with glioblastoma or astrocytoma include increased pressure in the brain, headaches, seizures, memory loss, changes in behavior, loss in movement or sensation on one side of the body, language dysfunction, cognitive impairments, visual impairment, nausea, vomiting, and weakness in the arms or legs.

[0689] Surgical removal of the tumor (or resection) is the standard treatment for removal of as much of the glioma as possible without damaging or with minimal damage to the normal, surrounding brain. Radiation therapy and/or chemotherapy are often used after surgery to suppress and slow recurrent disease from any remaining cancer cells or satellite lesions. Radiation therapy includes whole brain radiotherapy (conventional external beam radiation), targeted three-dimensional conformal radiotherapy, and targeted radionuclides. Chemotherapeutic agents commonly used to treat glioblastoma include temozolomide, gefitinib or erlotinib, and cisplatin. Angiogenesis inhibitors, such as Bevacizumab (Avastin®), are also commonly used in combination with chemotherapy and/or radiotherapy.

[0690] Supportive treatment is also frequently used to relieve neurological symptoms and improve neurologic function, and is administered in combination any of the cancer therapies described herein. The primary supportive agents include anticonvulsants and corticosteroids. Thus, the compositions and methods of the present disclosure can be used in combination with any of the standard or supportive treatments to treat a glioblastoma or astrocytoma.

[0691] The present disclosure provides for compositions and methods for treating cancer. In one aspect, the cancer is a hematologic cancer including but not limited to a leukemia or a lymphoma. In one aspect, disclosed herein are methods of treating cancers and malignancies including, but not limited to, e.g., acute leukemias including but not limited to, e.g., B-cell acute lymphoid leukemia (“BALL”), T-cell acute lymphoid leukemia (“TALL”), acute lymphoid leukemia (ALL); one or more chronic leukemias including but not limited to, e.g., chronic myelogenous leukemia (CML), chronic lymphocytic leukemia (CLL); additional hematologic cancers or hematologic conditions including, but not limited to, e.g., B cell prolymphocytic leukemia, blastic plasmacytoid dendritic cell neoplasm, Burkitt's lymphoma, diffuse large B cell lymphoma, Follicular lymphoma, Hairy cell leukemia, small cell- or a large cell-follicular lymphoma, malignant lymphoproliferative conditions, MALT lymphoma, mantle cell lymphoma, Marginal zone lymphoma, multiple myeloma, myelodysplasia and myelodysplastic syndrome, non-Hodgkin's lymphoma, plasmablastic lymphoma, plasmacytoid dendritic cell neoplasm, Waldenstrom macroglobulinemia, and “preleukemia” which are a diverse collection of hematological conditions united by ineffective production (or dysplasia) of myeloid blood cells, and the like. Further diseases associated with CD19 expression include, but are not limited to, e.g., atypical and/or non-classical cancers, malignancies, precancerous conditions or proliferative diseases expressing CD19.

[0692] In some embodiments, a CD19 binding molecule can be used to treat a disease including but not limited to a plasma cell proliferative disorder, e.g., asymptomatic myeloma (smoldering multiple myeloma or indolent myeloma), monoclonal gammapathy of undetermined significance (MGUS), Waldenstrom's macroglobulinemia, plasmacytomas (e.g., plasma cell dyscrasia, solitary myeloma, solitary plasmacytoma, extramedullary plasmacytoma, and multiple plasmacytoma), systemic amyloid light chain amyloidosis, and POEMS syndrome (also known as Crow-Fukase syndrome, Takatsuki disease, and PEP syndrome).

[0693] In some embodiments, the CD19 binding molecules are used to treat B cell malignancies.

[0694] In some embodiments, the B cell malignancy is a hematological cancer.

[0695] In some embodiments, the B cell malignancy is a malignant lymphoproliferative condition.

[0696] In some embodiments, the B cell malignancy is a plasma cell dyscrasia.

[0697] In some embodiments, the B cell malignancy is an acute leukemia. In some embodiments, the B cell malignancy is B cell acute lymphocytic leukemia (also known as B cell acute lymphoblastic leukaemia or B cell acute lymphoid leukemia) (ALL or B-ALL), e.g., relapsed and/or refractory B-ALL.

[0698] In some embodiments, the B cell malignancy is a non-Hodgkin's lymphoma (NHL), for example, chronic lymphocytic leukemia (CLL)/small lymphocytic lymphoma (SLL), follicular lymphoma (FL), mantle cell lymphoma (MCL), diffuse large B-cell lymphoma (DLBCL), Burkitt lymphoma, lymphoplasmacytic lymphoma (Waldenstrom macroglobulinemia), MALT lymphoma (mucosa-associated lymphoid tissue lymphoma) marginal zone lymphoma (MZL) (e.g., extranodal marginal zone lymphoma (EMZL) or nodal marginal zone B-cell lymphoma (NZML)).

[0699] In some embodiments, the B cell malignancy is a relapsed and/or refractory non-Hodgkin's lymphoma (NHL).

[0700] In some embodiments, the B cell malignancy is chronic lymphocytic leukemia (CLL)/small lymphocytic lymphoma (SLL), e.g., relapsed and/or refractory CLL/SLL.

[0701] In some embodiments, the B cell malignancy is follicular lymphoma (FL), e.g., relapsed and/or refractory FL. In some embodiments, the FL is small cell FL. In other embodiments, the FL is large cell FL.

[0702] In some embodiments, the B cell malignancy is mantle cell lymphoma (MCL), e.g., relapsed and/or refractory MCL.

[0703] In some embodiments, the B cell malignancy is diffuse large B-cell lymphoma (DLBCL), e.g., relapsed and/or refractory DLBCL.

[0704] In some embodiments, the B cell malignancy is Burkitt lymphoma.

[0705] In some embodiments, the B cell malignancy is lymphoplasmacytic lymphoma (Waldenstrom macroglobulinemia).

[0706] In some embodiments, the B cell malignancy is MALT lymphoma (mucosa-associated lymphoid tissue lymphoma).

[0707] In some embodiments, the B cell malignancy is marginal zone lymphoma (MZL).

[0708] In some embodiments, the B cell malignancy is extranodal marginal zone lymphoma (EMZL).

[0709] In some embodiments, the B cell malignancy is nodal marginal zone B-cell lymphoma (NZML).

[0710] In some embodiments, the B cell malignancy is splenic marginal zone B-cell lymphoma (SMZL).

[0711] In some embodiments, the B cell malignancy is a Hodgkin's lymphoma.

[0712] In some embodiments, the B cell malignancy is multiple myeloma.

[0713] In some embodiments, the B cell malignancy is hairy cell leukemia.

[0714] In some embodiments, the B cell malignancy is primary effusion lymphoma.

[0715] In some embodiments, the B cell malignancy is B cell prolymphocytic leukemia.

[0716] In some embodiments, the B cell malignancy is plasmablastic lymphoma.

[0717] In some embodiments, the B cell malignancy is follicle center lymphoma.

[0718] In some embodiments, the B cell malignancy is precursor B-lymphoblastic leukemia.

[0719] In some embodiments, the B cell malignancy is high-grade B-cell lymphoma.

[0720] In some embodiments, the B cell malignancy is primary mediastinal large B-cell lymphoma.

[0721] Certain aspects of the foregoing embodiments relate to subjects having an NHL and who (i) have failed at least one prior line (and optionally up to five prior lines) of standard of care therapy, e.g., an anti-CD20 therapy such as rituximab and/or (ii) is intolerant to or ineligible for one or more other approved therapies, e.g., autologous stem cell transplant (ASCT) and/or (iii) is a non-responder to a chimeric antigen receptor (CAR) T cell therapy. The NHL can be chronic lymphocytic leukemia (CLL)/small lymphocytic lymphoma (SLL), follicular lymphoma (FL), mantle cell lymphoma (MCL), diffuse large B-cell lymphoma (DLBCL), Burkitt lymphoma, lymphoplasmacytic lymphoma (Waldenstrom macroglobulinemia), MALT lymphoma (mucosa-associated lymphoid tissue lymphoma) marginal zone lymphoma (MZL) (e.g., extranodal marginal zone lymphoma (EMZL) or nodal marginal zone B-cell lymphoma (NZML)). In some embodiments, the NHL can relapsed and/or refractory, such as relapsed and/or refractory DLBCL or MCL.

[0722] Thus, in certain aspects, a subject having an NHL to whom a CD19 binding molecule of the disclosure is administered has failed at least one prior line of standard of care therapy and optionally up to five standard of care therapies. In various embodiments, the subject has failed one, two, three, four or five standard of care therapies. Exemplary standard of care therapies for B cell malignancies include anti-CD20 therapies such as rituximab.

[0723] In further aspects, a subject having an NHL to whom a CD19 binding molecule of the disclosure is administered is intolerant to or ineligible for one or more other approved therapies, e.g., autologous stem cell transplant (ASCT).

[0724] In yet further aspects, a subject having an NHL to whom a CD19 binding molecule of the disclosure is administered is a non-responder to chimeric antigen receptor (CAR) T cell therapy composition (“CAR composition”), e.g., an anti-CD19 CAR composition. In certain embodiments, the CAR composition comprises CTL019. In other embodiments, the CAR composition has the USAN or INN designation tisagenlecleucel. Tisagenlecleucel is marketed as KYMRIAH®. See, e.g., KYMRIAH® prescribing information, available at www.pharma.us.novartis.com/sites/www.pharma.us.novartis.com/files/kymriah.pdf. In other embodiments, the CAR composition has the USAN or INN designation axicabtagene ciloleucel. Axicabtagene ciloleucel is marketed as YESCARTA®. See, e.g., YESCARTA® prescribing information, available at www.yescarta.com/files/yescarta-pi.pdf. In other aspects, the CAR composition has the USAN designation brexucabtagene autoleucel. Brexucabtagene autoleucel is marketed as TECARTUS™. See, e.g., TECARTUSM prescribing information, available at www.gilead.com/-/media/files/pdfs/medicines/oncology/tecartus/tecartus-pi.pdf. In yet other embodiments, the CAR composition has the USAN or INN designation lisocabtagene maraleucel. Lisocabtagene maraleucel is marketed as BREYANZI®. See, e.g., BREYANZI® prescribing information, available at packageinserts.bms.com/pi/pi_breyanzi.pdf.

[0725] In some embodiments, a CD19 binding molecule can be used to treat a disease including but not limited to a cancer, e.g., a cancer described herein, e.g., a prostate cancer (e.g., castrate-resistant or therapy-resistant prostate cancer, or metastatic prostate cancer), pancreatic cancer, or lung cancer. 1%

[0726] The present disclosure also provides methods for inhibiting the proliferation or reducing a CD19-expressing cell population, the methods comprising contacting a population of cells comprising a CD19-expressing cell with a CD19 binding molecule. In a specific aspect, the present disclosure provides methods for inhibiting the proliferation or reducing the population of cancer cells expressing CD19, the methods comprising contacting the CD19-expressing cancer cell population with a CD19 binding molecule. In one aspect, the disclosure provides methods for inhibiting the proliferation or reducing the population of cancer cells expressing CD19, the methods comprising contacting the BMCA-expressing cancer cell population with a CD19 binding molecule. In certain aspects, the methods reduce the quantity, number, amount or percentage of cells and/or cancer cells by at least 25%, at least 30%, at least 40%, at least 50%, at least 65%, at least 75%, at least 85%, at least 95%, or at least 99% in a subject with or an animal model for myeloid leukemia or another cancer associated with CD19-expressing cells relative to a negative control. In one aspect, the subject is a human.

[0727] The present disclosure provides methods for preventing relapse of cancer associated with CD19-expressing cells, the methods comprising administering to a subject in need thereof a CD19 binding molecule.

[0728] 7.16.2. Non-Cancer Related Diseases and Disorders

[0729] Non-cancer related diseases and disorders associated with CD19 expression, for example immune conditions, can also be treated by the compositions and methods disclosed herein. Such immune conditions can be characterized by inappropriate activation of immune cells and are typically classified into four types: anaphylactic reactions, cytotoxic (cytolytic) reactions, immune complex reactions, or cell-mediated immunity (CMI) reactions (also referred to as delayed-type hypersensitivity (DTH) reactions). (See, e.g., Fundamental Immunology, William E. Paul ed., Raven Press, N.Y., 3rd ed. 1993.)

[0730] Specific examples of such immunological diseases include, but are not limited to, rheumatoid arthritis, multiple sclerosis, endocrine ophthalmopathy, uveoretinitis, systemic lupus erythematosus, myasthenia gravis, Grave's disease, glomerulonephritis, autoimmune hepatological disorder, autoimmune inflammatory bowel disease, anaphylaxis, allergic reaction, Sjogren's syndrome, juvenile onset (Type 1) diabetes mellitus, primary biliary cirrhosis, Wegener's granulomatosis, fibromyalgia, inflammatory bowel disease, polymyositis, dermatomyositis, multiple endocrine failure, Schmidt's syndrome, autoimmune uveitis, Addison's disease, adrenalitis, thyroiditis, Hashimoto's thyroiditis, autoimmune thyroid disease, pernicious anemia, gastric atrophy, chronic hepatitis, lupoid hepatitis, atherosclerosis, presenile dementia, demyelinating diseases, subacute cutaneous lupus erythematosus, hypoparathyroidism, Dressler's syndrome, autoimmune thrombocytopenia, idiopathic thrombocytopenic purpura, hemolytic anemia, pemphigus vulgaris, pemphigus, dermatitis herpetiformis, alopecia arcata, pemphigoid, scleroderma, progressive systemic sclerosis, CREST syndrome (calcinosis, Raynaud's phenomenon, esophageal dysmotility, sclerodactyly, and telangiectasia), adult onset diabetes mellitus (Type II diabetes), male and female autoimmune infertility, ankylosing spondolytis, ulcerative colitis, Crohn's disease, mixed connective tissue disease, polyarteritis nedosa, systemic necrotizing vasculitis, juvenile onset rheumatoid arthritis, atopic dermatitis, atopic rhinitis, Goodpasture's syndrome, Chagas' disease, sarcoidosis, rheumatic fever, asthma, recurrent abortion, anti-phospholipid syndrome, farmers lung, erythema multiforme, post cardiotomy syndrome, Cushing's syndrome, autoimmune chronic active hepatitis, bird-fanciers lung, allergic encephalomyelitis, toxic epidermal necrolysis, Alport's syndrome, alveolitis, allergic alveolitis, fibrosing alveolitis, interstitial lung disease, erythema nodosum, pyoderma gangrenosum, transfusion reaction, leprosy, malaria, leishmaniasis, trypanosomiasis, Takayasu's arteritis, polymyalgia rheumatica, temporal arteritis, schistosomiasis, giant cell arteritis, ascariasis, aspergillosis, Sampter's syndrome, eczema, lymphomatoid granulomatosis, Behcet's disease, Caplan's syndrome, Kawasaki's disease, dengue, encephalomyelitis, endocarditis, endomyocardial fibrosis, endophthalmitis, erythema elevatum et diutinum, psoriasis, erythroblastosis fetalis, eosinophilic faciitis, Shulman's syndrome, Felty's syndrome, filariasis, cyclitis, chronic cyclitis, heterochronic cyclitis, Fuch's cyclitis, IgA nephropathy, Henoch-Schonlein purpura, graft versus host disease, transplantation rejection, human immunodeficiency virus infection, echovirus infection, cardiomyopathy, Alzheimer's disease, parvovirus infection, rubella virus infection, post vaccination syndromes, congenital rubella infection, Eaton-Lambert syndrome, relapsing polychondritis, cryoglobulinemia, Waldenstrom's macroglobulemia, Epstein-Barr virus infection, mumps, Evan's syndrome, and autoimmune gonadal failure.

[0731] Accordingly, the methods described herein encompass treatment of disorders of B lymphocytes (e.g., systemic lupus erythematosus, Goodpasture's syndrome, rheumatoid arthritis, and type I diabetes), Th₁-lymphocytes (e.g., rheumatoid arthritis, multiple sclerosis, psoriasis, Sjorgren's syndrome, Hashimoto's thyroiditis, Grave's disease, primary biliary cirrhosis, Wegener's granulomatosis, tuberculosis, or graft versus host disease), or Th₂-lymphocytes (e.g., atopic dermatitis, systemic lupus erythematosus, atopic asthma, rhinoconjunctivitis, allergic rhinitis, or chronic graft versus host disease). Generally, disorders involving dendritic cells involve disorders of Th₁-lymphocytes or Th₂-lymphocytes.

[0732] In some embodiments, the CD19 binding molecules are used to treat an autoimmune disease, for example an autoimmune disease that is mediated at least in part by B cells. Examples of autoimmune diseases include acute necrotizing hemorrhagic leukoencephalitis; Addison's disease; Agammaglobulinemia; Allergic asthma; Allergic rhinitis; Alopecia areata; Amyloidosis; Ankylosing spondylitis; Anti-GBM/Anti-TBM nephritis; Antiphospholipid syndrome; Autoimmune aplastic anemia; Autoimmune dysautonomia; Autoimmune hepatitis; Autoimmune hyperlipidemia; Autoimmune immunodeficiency; Autoimmune inner ear disease; Autoimmune myocarditis; Autoimmune thrombocytopenic purpura; Axonal & neuronal neuropathies; Balo disease; Behcet's disease; Bullous pemphigoid; Cardiomyopathy; Castleman disease; Celiac sprue (nontropical); Chagas disease; Chronic fatigue syndrome; Chronic inflammatory demyelinating polyneuropathy; Churg-Strauss syndrome; Cicatricial pemphigoid/benign mucosal pemphigoid; Crohn's disease; Cogans syndrome; Cold agglutinin disease; Congenital heart block; Coxsackie myocarditis; CREST disease; Essential mixed cryoglobulinemia; Demyelinating neuropathies; Dermatomyositis; Devic disease; Discoid lupus; Dressler's syndrome; Endometriosis; Eosinophilic fasciitis; Erythema nodosum; Experimental allergic encephalomyelitis; Evans syndrome; Fibromyalgia; Fibrosing alveolitis; Giant cell arteritis (temporal arteritis); Goodpasture's syndrome; Graves' disease; Guillain-Barre syndrome; Hashimoto's disease; Hemolytic anemia; Henoch-Schonlein purpura; Herpes gestationis; Hypogammaglobulinemia; Idiopathic thrombocytopenic purpura; IgA nephropathy; Immunoregulatory lipoproteins; Inclusion body myositis; Insulin-dependent diabetes (type1); Interstitial cystitis; Juvenile arthritis; Juvenile diabetes; Kawasaki syndrome; Lambert-Eaton syndrome; Leukocytoclastic vasculitis; Lichen planus; Lichen sclerosus; Ligneous conjunctivitis; Linear IgA disease (LAD); Lupus (SLE); Lyme disease; Meniere's disease; Microscopic polyangiitis; Mixed connective tissue disease; Mooren's ulcer; Mucha-Habermann disease; Multiple sclerosis; Myasthenia gravis; Myositis; Narcolepsy; Neutropenia; Ocular cicatricial pemphigoid; Osteoarthritis; Palindromic rheumatism; Paraneoplastic cerebellar degeneration; Paroxysmal nocturnal hemoglobinuria; Parsonnage-Turner syndrome; Pars planitis (peripheral uveitis); Pemphigus; Peripheral neuropathy; Perivenous encephalomyelitis; Pernicious anemia; POEMS syndrome; Polyarteritis nodosa; Type I, II, & III autoimmune polyglandular syndromes; Polymyalgia rheumatica; Polymyositis; Postmyocardial infarction syndrome; Postpericardiotomy syndrome; Progesterone dermatitis; Primary biliary cirrhosis; Psoriasis; Psoriatic arthritis; Idiopathic pulmonary fibrosis; Pyoderma gangrenosum; Pure red cell aplasia; Raynauds phenomenon; Reflex sympathetic dystrophy; Reiter's syndrome; Relapsing polychondritis; Restless legs syndrome; Rheumatic fever; Rheumatoid arthritis; Sarcoidosis; Schmidt syndrome; Scleritis; Scleroderma; Sjogren's syndrome; Sperm & testicular autoimmunity; Stiff person syndrome; Subacute bacterial endocarditis; Sympathetic ophthalmia; Takayasu's arteritis; Temporal arteritis/Giant cell arteritis; Thrombocytopenic purpura; Autoimmune thyroid disease; Tolosa-Hunt syndrome; Transverse myelitis & necrotizing myelopathy; Ulcerative colitis; Undifferentiated connective tissue disease; Uveitis; Vasculitis; Vesiculobullous dermatosis; Vitiligo; and Wegener's granulomatosis. The more common autoimmune diseases that are of especial interest include (a) connective tissue diseases such as systemic lupus erythematosus, rheumatoid arthritis, systemic sclerosos (scleroderma), Sjogren's syndrome, (b) neuromuscular diseases such as multiple sclerosos, myasthenis gravis, Guillain-Barre syndrome, (c) endocrine diseases such as Hashimoto's thryoiditis, Grave's disease, insulin-dependent (type 1) diabetes, and (d) gastrointestinal diseases such as inflammatory bowel disease (including Crohn's disease and ulcerative colitis), and (e) other diseases such as vasculitis syndromes, hematologic autoimmune diseases, and autoimmune skin diseases.

[0733] The autoimmune disease can be characterized by the presence of autoantibodies. The autoantibody can bind specifically to host targets or antigens, for example rheumatoid factor (e.g., in rheumatoid arthritis); topoisomerase (e.g., in scleroderma); myelin basic protein (e.g., in multiple sclerosis); basement membrane collagen type iv protein (e.g., in Goodpasture's syndrome); ganglioside (e.g., in Guillain-Barre syndrome); platelets (e.g., chronic idiopathic thrombocytopenia); smooth muscle actin (e.g., in autoimmune hepatitis); bullous pemphigoid antigen 1 and 2; also called hemidesmosome antigens (e.g., in bullous pemphigoid); transglutaminase (e.g., in coeliac disease); desmogein 3 (e.g., in pemphigus vulgaris); p62 or sp100 or mitochondrial (m2) antigens (e.g., in primary biliary cirrhosis); neutrophil cytoplasmic c-ANCA (e.g., in Wegener's granulomatosis); neutrophil perinuclear p-ANCA (e.g., Polyarteritis nodosa, Microscopic polyangiitis, Churg-Strauss syndrome, Systemic vasculitides (non-specific)); double-stranded-DNA (e.g., in systemic lupus erythematosus); exosome complex (e.g., in Scleromyositis); Ro or La antigen (e.g., in systemic lupus erythematosus and neonatal heart block, or primary Sjogren's syndrome); Smith antigen (e.g., in systemic lupus erythematosus); phospholipid antigen (e.g., in antiphospholipid syndrome); SSA or SSB antigen (e.g., in Sjogren's syndrome); centromere (e.g., in CREST syndrome; mitochondria (e.g., in primary biliary cirrhosis); nicotinic acetylcholine receptor (e.g., in myasthenia gravis); voltage-gated calcium channel (e.g., in Lambert-Eaton syndrome); thyroid peroxidase (e.g., in Hashimoto's thyroiditis); TSH receptor (e.g., in Grave's disease); Hu antigen (e.g., in paraneoplastic cerebellar syndrome); voltage-gated potassium channel (e.g., in limbic encephalitis and N-methyl-D-aspartate receptor (e.g., in encephalitis). More than one type of autoantibody can be associated with an immunological disorder or visa versa, and this list in not exhaustive. For example, autoantigens that have been identified in rheumatoid arthritis include joint-associated proteins such as collagen type II, human chondrocyte glycoprotein 39, and proteoglycans; as well as heat shock proteins, citrullinated filaggrin, immunoglobulin, glucose-6-phosphate isomerase, p205, and BiP.

[0734] Autoimmune disorders that can be treated with the CD19 binding molecules of the disclosure include systemic lupus erythematosus (SLE), Sjögren's syndrome, scleroderma, rheumatoid arthritis (RA), juvenile idiopathic arthritis, graft versus host disease, dermatomyositis, type I diabetes mellitus, Hashimoto's thyroiditis, Graves's disease, Addison's disease, celiac disease, disorders related to mucosal immunity, irritable bowel diseases (e.g., Crohn's Disease, ulcerative colitis), pernicious anaemia, pemphigus vulgaris, vitiligo, autoimmune haemolytic anaemia, idiopathic thrombocytopenic purpura, giant cell arteritis, myasthenia gravis, multiple sclerosis (MS) (e.g., relapsing-remitting MS (RRMS)), glomerulonephritis, Goodpasture's syndrome, bullous pemphigoid, colitis ulcerosa, Guillain-Barré syndrome, chronic inflammatory demyelinating polyneuropathy, anti-phospholipid syndrome, narcolepsy, sarcoidosis, and Wegener's granulomatosis.

[0735] In some embodiments, the CD19 binding molecules are used to treat systemic lupus erythematosus (SLE).

[0736] In some embodiments, the CD19 binding molecules are used to treat Sjögren's syndrome.

[0737] In some embodiments, the CD19 binding molecules are used to treat scleroderma.

[0738] In some embodiments, the CD19 binding molecules are used to treat rheumatoid arthritis (RA).

[0739] In some embodiments, the CD19 binding molecules are used to treat juvenile idiopathic arthritis.

[0740] In some embodiments, the CD19 binding molecules are used to treat graft versus host disease.

[0741] In some embodiments, the CD19 binding molecules are used to treat dermatomyositis.

[0742] In some embodiments, the CD19 binding molecules are used to treat type I diabetes mellitus.

[0743] In some embodiments, the CD19 binding molecules are used to treat Hashimoto's thyroiditis.

[0744] In some embodiments, the CD19 binding molecules are used to treat Graves's disease.

[0745] In some embodiments, the CD19 binding molecules are used to treat Addison's disease.

[0746] In some embodiments, the CD19 binding molecules are used to treat celiac disease.

[0747] In some embodiments, the CD19 binding molecules are used to treat Crohn's Disease.

[0748] In some embodiments, the CD19 binding molecules are used to treat pernicious anaemia.

[0749] In some embodiments, the CD19 binding molecules are used to treat pemphigus vulgaris.

[0750] In some embodiments, the CD19 binding molecules are used to treat vitiligo.

[0751] In some embodiments, the CD19 binding molecules are used to treat autoimmune haemolytic anaemia.

[0752] In some embodiments, the CD19 binding molecules are used to treat idiopathic thrombocytopenic purpura.

[0753] In some embodiments, the CD19 binding molecules are used to treat giant cell arteritis.

[0754] In some embodiments, the CD19 binding molecules are used to treat myasthenia gravis.

[0755] In some embodiments, the CD19 binding molecules are used to treat multiple sclerosis (MS). In some embodiments, the MS is relapsing-remitting MS (RRMS).

[0756] In some embodiments, the CD19 binding molecules are used to treat glomerulonephritis.

[0757] In some embodiments, the CD19 binding molecules are used to treat Goodpasture's syndrome.

[0758] In some embodiments, the CD19 binding molecules are used to treat bullous pemphigoid.

[0759] In some embodiments, the CD19 binding molecules are used to treat colitis ulcerosa.

[0760] In some embodiments, the CD19 binding molecules are used to treat Guillain-Barré syndrome.

[0761] In some embodiments, the CD19 binding molecules are used to treat chronic inflammatory demyelinating polyneuropathy.

[0762] In some embodiments, the CD19 binding molecules are used to treat anti-phospholipid syndrome.

[0763] In some embodiments, the CD19 binding molecules are used to treat narcolepsy.

[0764] In some embodiments, the CD19 binding molecules are used to treat sarcoidosis.

[0765] In some embodiments, the CD19 binding molecules are used to treat Wegener's granulomatosis.

[0766] Examples of other non-cancer related diseases and disorders associated with CD19 expression include, but are not limited to: viral, e.g., HIV, infections and fungal, e.g., C. neoformans, infections.

### 7.17. Combination Therapy

[0767] A CD19 binding molecule of the disclosure can be used in combination other known agents and therapies. For example, the CD19 binding molecules can be used in treatment regimens in combination with surgery, chemotherapy, antibodies, radiation, peptide vaccines, steroids, cytoxins, proteasome inhibitors, immunomodulatory drugs (e.g., IMiDs), BH3 mimetics, cytokine therapies, stem cell transplant or any combination thereof.

[0768] For convenience, an agent that is used in combination with a CD19 binding molecule is referred to herein as an “additional” agent.

[0769] Administered “in combination,” as used herein, means that two (or more) different treatments are delivered to the subject during the course of the subject's affliction with the disorder, e.g., the two or more treatments are delivered after the subject has been diagnosed with the disorder and before the disorder has been cured or eliminated or treatment has ceased for other reasons. In some embodiments, the delivery of one treatment is still occurring when the delivery of the second begins, so that there is overlap in terms of administration. This is sometimes referred to herein as “simultaneous” or “concurrent delivery”. For example, each therapy can be administered to a subject at the same time or sequentially in any order at different points in time; however, if not administered at the same time, they should be administered sufficiently close in time so as to provide the desired therapeutic effect.

[0770] A CD19 binding molecule and one or more additional agents can be administered simultaneously, in the same or in separate compositions, or sequentially. For sequential administration, the CD19 binding molecule can be administered first, and the additional agent can be administered second, or the order of administration can be reversed.

[0771] The CD19 binding molecule and the additional agent(s) can be administered to a subject in any appropriate form and by any suitable route. In some embodiments, the routes of administration are the same. In other embodiments the routes of administration are different.

[0772] In other embodiments, the delivery of one treatment ends before the delivery of the other treatment begins.

[0773] In some embodiments of either case, the treatment is more effective because of combined administration. For example, the second treatment is more effective, e.g., an equivalent effect is seen with less of the second treatment, or the second treatment reduces symptoms to a greater extent, than would be seen if the second treatment were administered in the absence of the first treatment, or the analogous situation is seen with the first treatment. In some embodiments, delivery is such that the reduction in a symptom, or other parameter related to the disorder is greater than what would be observed with one treatment delivered in the absence of the other. The effect of the two treatments can be partially additive, wholly additive, or greater than additive. The delivery can be such that an effect of the first treatment delivered is still detectable when the second is delivered.

[0774] The CD19 binding molecules and/or additional agents can be administered during periods of active disorder, or during a period of remission or less active disease. A CD19 binding molecule can be administered before the treatment with the additional agent(s), concurrently with the treatment with the additional agent(s), post-treatment with the additional agent(s), or during remission of the disorder.

[0775] When administered in combination, the CD19 binding molecule and/or the additional agent(s) can be administered in an amount or dose that is higher, lower or the same than the amount or dosage of each agent used individually, e.g., as a monotherapy.

[0776] The additional agent(s) of the combination therapies of the disclosure can be administered to a subject concurrently. The term “concurrently” is not limited to the administration of therapies (e.g., prophylactic or therapeutic agents) at exactly the same time, but rather it is meant that a pharmaceutical composition comprising a CD19 binding molecule is administered to a subject in a sequence and within a time interval such that the molecules of the disclosure can act together with the additional therapy(ies) to provide an increased benefit than if they were administered otherwise. For example, each therapy can be administered to a subject at the same time or sequentially in any order at different points in time; however, if not administered at the same time, they should be administered sufficiently close in time so as to provide the desired therapeutic or prophylactic effect. Each therapy can be administered to a subject separately, in any appropriate form and by any suitable route.

[0777] The CD19 binding molecule and the additional agent(s) can be administered to a subject by the same or different routes of administration.

[0778] The CD19 binding molecules and the additional agent(s) can be cyclically administered. Cycling therapy involves the administration of a first therapy (e.g., a first prophylactic or therapeutic agent) for a period of time, followed by the administration of a second therapy (e.g., a second prophylactic or therapeutic agent) for a period of time, optionally, followed by the administration of a third therapy (e.g., prophylactic or therapeutic agent) for a period of time and so forth, and repeating this sequential administration, i.e., the cycle in order to reduce the development of resistance to one of the therapies, to avoid or reduce the side effects of one of the therapies, and/or to improve the efficacy of the therapies.

[0779] In certain embodiments, the one or more additional agents, are other anti-cancer agents, anti-allergic agents, anti-nausea agents (or anti-emetics), pain relievers, cytoprotective agents, and combinations thereof.

[0780] In one embodiment, a CD19 binding molecule can be used in combination with an anti-cancer agent (e.g., a chemotherapeutic agent). Exemplary chemotherapeutic agents include an anthracycline (e.g., doxorubicin (e.g., liposomal doxorubicin)), a vinca alkaloid (e.g., vinblastine, vincristine, vindesine, vinorelbine), an alkylating agent (e.g., cyclophosphamide, decarbazine, melphalan, ifosfamide, temozolomide), an immune cell antibody (e.g., alemtuzamab, gemtuzumab, rituximab, tositumomab, obinutuzumab, ofatumumab, daratumumab, elotuzumab), an antimetabolite (including, e.g., folic acid antagonists, pyrimidine analogs, purine analogs and adenosine deaminase inhibitors (e.g., fludarabine)), an mTOR inhibitor, a TNFR glucocorticoid induced TNFR related protein (GITR) agonist, a proteasome inhibitor (e.g., aclacinomycin A, gliotoxin or bortezomib), an immunomodulator such as an immunomodulatory imide drug (IMiD), including thalidomide or a thalidomide derivative (e.g., lenalidomide, pomalidomide, or iberdomide). In some embodiments, the anti-cancer agent is lenalidomide.

[0781] General chemotherapeutic agents considered for use in combination therapies include anastrozole (Arimidex®), bicalutamide (Casodex®), bleomycin sulfate (Blenoxane®), busulfan (Myleran®), busulfan injection (Busulfex®), capecitabine (Xeloda®), N4-pentoxycarbonyl-5-deoxy-5-fluorocytidine, carboplatin (Paraplatin®), carmustine (BiCNU®), chlorambucil (Leukeran®), cisplatin (Platinol®), cladribine (Leustatin®), cyclophosphamide (Cytoxan® or Neosar®), cytarabine, cytosine arabinoside (Cytosar-U®), cytarabine liposome injection (DepoCyt®), dacarbazine (DTIC-Dome®), dactinomycin (Actinomycin D, Cosmegan), daunorubicin hydrochloride (Cerubidine®), daunorubicin citrate liposome injection (DaunoXome®), dexamethasone, docetaxel (Taxotere®), doxorubicin hydrochloride (Adriamycin®, Rubex®), etoposide (Vepesid®), fludarabine phosphate (Fludara®), 5-fluorouracil (Adrucil®, Efudex®), flutamide (Eulexin®), tezacitibine, Gemcitabine (difluorodeoxycitidine), hydroxyurea (Hydrea®), Idarubicin (Idamycin®), ifosfamide (IFEX®), irinotecan (Camptosar®), L-asparaginase (ELSPAR®), leucovorin calcium, melphalan (Alkeran®), 6-mercaptopurine (Purinethol®), methotrexate (Folex®), mitoxantrone (Novantrone®), mylotarg, paclitaxel (Taxol®), phoenix (Yttrium90/MX-DTPA), pentostatin, polifeprosan 20 with carmustine implant (Gliadel®), tamoxifen citrate (Nolvadex®), teniposide (Vumon®), 6-thioguanine, thiotepa, tirapazamine (Tirazone®), topotecan hydrochloride for injection (Hycamptin®), vinblastine (Velban®), vincristine (Oncovin®), and vinorelbine (Navelbine®).

[0782] Anti-cancer agents of particular interest for combinations with the CD19 binding molecules of the present disclosure include: anthracyclines; alkylating agents; antimetabolites; drugs that inhibit either the calcium dependent phosphatase calcineurin or the p70S6 kinase FK506) or inhibit the p70S6 kinase; mTOR inhibitors; immunomodulators; anthracyclines; vinca alkaloids; proteasome inhibitors; GITR agonists (e.g., GWN323); protein tyrosine phosphatase inhibitors; a CDK4 kinase inhibitor; a BTK inhibitor; a MKN kinase inhibitor; a DGK kinase inhibitor; an oncolytic virus; a BH3 mimetic; and cytokine therapies.

[0783] Exemplary alkylating agents include, without limitation, nitrogen mustards, ethylenimine derivatives, alkyl sulfonates, nitrosoureas and triazenes): uracil mustard (Aminouracil Mustard®, Chlorethaminacl®, Demethyldopan®, Desmethyldopan®, Haemanthamine®, Nordopan®, Uracil nitrogen Mustard®, Uracillost®, Uracilmostaza®, Uramustin®, Uramustine®), chlormethine (Mustargen®), cyclophosphamide (Cytoxan®, Neosar®, Clafen®, Endoxan®, Procytox®, Revimmune™), ifosfamide (Mitoxana®), melphalan (Alkeran®), Chlorambucil (Leukeran®), pipobroman (Amedel®, Vercyte®), triethylenemelamine (Hemel®, Hexalen®, Hexastat®), triethylenethiophosphoramine, Temozolomide (Temodar®), thiotepa (Thioplex®), busulfan (Busilvex®, Myleran®), carmustine (BiCNU®), lomustine (CeeNU®), streptozocin (Zanosar®), and Dacarbazine (DTIC-Dome®). Additional exemplary alkylating agents include, without limitation, Oxaliplatin (Eloxatin®); Temozolomide (Temodar® and Temodal); Dactinomycin (also known as actinomycin-D, Cosmegeni); Melphalan (also known as L-PAM, L-sarcolysin, and phenylalanine mustard, Alkeran®); Altretamine (also known as hexamethylmelamine (HMM), Hexaleni); Carmustine (BiCNU®); Bendamustine (Treanda®); Busulfan (Busulfex® and Myleran®); Carboplatin (Paraplatin®); Lomustine (also known as CCNU, CeeNU®); Cisplatin (also known as CDDP, Platinol® and Platinol®-AQ); Chlorambucil (Leukeran®); Cyclophosphamide (Cytoxan® and Neosar®); Dacarbazine (also known as DTIC, DIC and imidazole carboxamide, DTIC-Dome®); Altretamine (also known as hexamethylmelamine (HMM), Hexaleni); Ifosfamide (Ifex®); Prednumustine; Procarbazine (Matulane®); Mechlorethamine (also known as nitrogen mustard, mustine and mechloroethamine hydrochloride, Mustargeni); Streptozocin (Zanosar®); Thiotepa (also known as thiophosphoamide, TESPA and TSPA, Thioplex®); Cyclophosphamide (Endoxan®, Cytoxan®, Neosar®, Procytox®, Revimmune®); and Bendamustine HCl (Treanda®).

[0784] Exemplary mTOR inhibitors include, e.g., temsirolimus; ridaforolimus (formally known as deferolimus, (1R,2R,4S)-4-[(2R)-2 [(1R,9S,12S,15R,16E,18R,19R,21R,23S,24E,26E,28Z,30S,32S,35R)-1,18-dihydroxy-19,30-dimethoxy-15,17,21,23,29,35-hexamethyl-2,3,10,14,20-pentaoxo-11,36-dioxa-4-azatricyclo[30.3.1.04,9] hexatriaconta-16,24,26,28-tetraen-12-yl]propyl]-2-methoxycyclohexyl dimethylphosphinate, also known as AP23573 and MK8669, and described in PCT Publication No. WO 03/064383); everolimus (Afinitor® or RAD001); rapamycin (AY22989, Sirolimus®); simapimod (CAS 164301-51-3); emsirolimus, (5-{2,4-Bis[(3S)-3-methylmorpholin-4-yl]pyrido[2,3-d]pyrimidin-7-yl}-2-methoxyphenyl)methanol (AZD8055); 2-Amino-8-[trans-4-(2-hydroxyethoxy)cyclohexyl]-6-(6-methoxy-3-pyridinyl)-4-methyl-pyrido[2,3-d]pyrimidin-7(8H)-one (PF04691502, CAS 1013101-36-4); and N2-[1,4-dioxo-4-[[4-(4-oxo-8-phenyl-4H-1-benzopyran-2-yl)morpholinium-4-yl]methoxy]butyl]-L-arginylglycyl-L-α-aspartylL-serine- (SEQ ID NO: 757), inner salt (SF1126, CAS 936487-67-1), and XL765.

[0785] Exemplary immunomodulators include, e.g., afutuzumab (available from Roche®); pegfilgrastim (Neulasta); lenalidomide (CC-5013, Revlimid®); IMIDs (such as thalidomide (Thalomid®), lenalidomide, pomalidomide, and apremilast), actimid (CC4047); and IRX-2 (mixture of human cytokines including interleukin 1, interleukin 2, and interferon γ, CAS 951209-71-5, available from IRX Therapeutics).

[0786] Exemplary anthracyclines include, e.g., doxorubicin (Adriamycin® and Rubex®); bleomycin (Ienoxane®); daunorubicin (dauorubicin hydrochloride, daunomycin, and rubidomycin hydrochloride, Cerubidine®); daunorubicin liposomal (daunorubicin citrate liposome, DaunoXome®); mitoxantrone (DHAD, Novantrone®); epirubicin (Ellence™); idarubicin (Idamycin®, Idamycin PFS®); mitomycin C (Mutamycin®); geldanamycin; herbimycin; ravidomycin; and desacetylravidomycin.

[0787] Exemplary vinca alkaloids include, e.g., vinorelbine tartrate (Navelbine®), Vincristine (Oncovin®), and Vindesine (Eldisine®)); vinblastine (also known as vinblastine sulfate, vincaleukoblastine and VLB, Alkaban-AQ® and Velban®); and vinorelbine (Navelbine®).

[0788] Exemplary proteasome inhibitors include bortezomib (Velcade®); carfilzomib (PX-171-007, (S)-4-Methyl-N—((S)-1-(((S)-4-methyl-1-((R)-2-methyloxiran-2-yl)-1-oxopentan-2-yl)amino)-1-oxo-3-phenylpropan-2-yl)-2-((S)-2-(2-morpholinoacetamido)-4-phenylbutanamido)-pentanamide); marizomib (NPI-0052); ixazomib citrate (MLN-9708); delanzomib (CEP-18770); and O-Methyl-N-[(2-methyl-5-thiazolyl)carbonyl]-L-seryl-O-methyl-N-[(1S)-2-[(2R)-2-methyl-2-oxiranyl]-2-oxo-1-(phenylmethyl)ethyl]-L-serinamide (ONX-0912).

[0789] Exemplary BH3 mimetics include venetoclax, ABT-737 (4-{4-[(4′-Chloro-2-biphenylyl)methyl]-1-piperazinyl}-N-[(4-{[(2R)-4-(dimethylamino)-1-(phenylsulfanyl)-2-butanyl]amino}-3-nitrophenyl)sulfonyl]benzamide and navitoclax (formerly ABT-263).

[0790] Exemplary cytokine therapies include interleukin 2 (IL-2) and interferon-alpha (IFN-alpha).

[0791] In certain aspects, “cocktails” of different chemotherapeutic agents are administered as the additional agent(s).

[0792] In some embodiments, a CD19 binding molecule can be used in combination with a member of the thalidomide class of compounds. Members of the thalidomide class of compounds include, but are not limited to, lenalidomide (CC-5013), pomalidomide (CC-4047 or ACTIMID), thalidomide, and salts and derivatives thereof. In some embodiments, the CD19 binding molecule is used in combination with a mixture of one, two, three, or more members of the thalidomide class of compounds. Thalidomide analogs and immunomodulatory properties of thalidomide analogs are described in Bodera and Stankiewicz, Recent Pat Endocr Metab Immune Drug Discov. 2011 September; 5(3):192-6. The structural complex of thalidomide analogs and the E3 ubiquitin is described in Gandhi et al., Br J Haematol. 2014 March; 164(6):811-21. The modulation of the E3 ubiquitin ligase by thalidomide analogs is described in Fischer et al., Nature. 2014 Aug. 7; 512(7512):49-53.

[0793] In some embodiments, the member of the thalidomide class of compounds comprises a compound of Formula (1):

[chemical structure]

or a pharmaceutically acceptable salt, ester, hydrate, solvate, or tautomer thereof, where:
[0794] X is O or S;
[0795] R¹ is C₁-C₆ alkyl, C₂-C₆ alkenyl, C₂-C₆ alkynyl, C₁-C₆ heteroalkyl, carbocyclyl, heterocyclyl, aryl, or heteroaryl, each of which is optionally substituted by one or more R⁴;
[0796] each of R^{2a} and R^{2b} is independently hydrogen or C₁-C₆ alkyl; or R^{2a} and R^{2b} together with the carbon atom to which they are attached form a carbonyl group or a thiocarbonyl group;
[0797] each of R³ is independently C₁-C₆ alkyl, C₂-C₆ alkenyl, C₂-C₆ alkynyl, C₁-C₆ heteroalkyl, halo, cyano, —C(O)R^{A}, —C(O)OR^{B}, —OR^{B}, —N(R^{C})(R^{D}), —C(O)N(R^{C})(R^{D}), —N(R^{C})C(O)R^{A}, —S(O)ₓR^{E}, —S(O)ₓN(R^{C})(R^{D}), or —N(R^{C})S(O)ₓR^{E}, where each alkyl, alkenyl, alkynyl, and heteroalkyl is independently and optionally substituted with one or more R⁸;
[0798] each R⁴ is independently C₁-C₆ alkyl, C₂-C₆ alkenyl, C₂-C₆ alkynyl, C₁-C₆ heteroalkyl, halo, cyano, oxo, —C(O)R^{A}, —C(O)OR^{B}, —OR^{B}, —N(R^{C})(R^{D}), —C(O)N(R^{C})(R^{D}), —N(R^{C})C(O)R^{A}, —S(O)ₓR^{E}, —S(O)ₓN(R^{C})(R^{D}), —N(R^{C})S(O)ₓR^{E}, carbocyclyl, heterocyclyl, aryl, or heteroaryl, where each alkyl, alkenyl, alkynyl, heteroalkyl, carbocyclyl, heterocyclyl, aryl, and heteroaryl is independently and optionally substituted with one or more R⁷;
[0799] each of R^{A}, R^{B}, R^{C}, R^{D}, and R^{E} is independently hydrogen or C₁-C₆ alkyl;
[0800] each R⁶ is independently C₁-C₆ alkyl, oxo, cyano, —OR^{B}, —N(R^{C})(R^{D}), —C(O)N(R^{C})(R^{D}), —N(R^{C})C(O)R^{A}, aryl, or heteroaryl, where each aryl and heteroaryl is independently and optionally substituted with one or more R⁸;
[0801] each R⁷ is independently halo, oxo, cyano, —OR^{B}, —N(R^{C})(R^{D}), —C(O)N(R^{C})(R^{D}), or —N(R^{C})C(O)R^{A};
[0802] each R^{a} is independently C₁-C₆ alkyl, cyano, —OR^{B}, —N(R^{C})(R^{D}), —C(O)N(R^{C})(R^{D}), or —N(R^{C})C(O)R^{A};
[0803] n is 0, 1, 2, 3 or 4; and
[0804] x is 0, 1, or 2.

[0805] In some embodiments, X is O.

[0806] In some embodiments, R¹ is heterocyclyl. In some embodiments, R¹ is a 6-membered heterocyclyl or a 5-membered heterocyclyl. In some embodiments, R¹ is a nitrogen-containing heterocyclyl. In some embodiments, R¹ is piperidinyl (e.g., piperidine-2,6-dionyl).

[0807] In some embodiments, each of R^{2a} and R^{2b} is independently hydrogen. In some embodiments, R^{2a} and R^{2b} together with the carbon to which they are attached form a carbonyl group.

[0808] In some embodiments, R³ is C₁-C₆ heteroalkyl, —N(R^{C})(R^{D}) or —N(R^{C})C(O)R^{A}. In some embodiments, R³ is C₁-C₆ heteroalkyl (e.g., CH₂NHC(O)CH₂-phenyl-t-butyl), —N(R^{C})(R^{D}) (e.g., NH₂), or —N(R^{C})C(O)R^{A} (e.g., NHC(O)CH₃).

[0809] In an embodiment, X is O. In an embodiment, R¹ is heterocyclyl (e.g., piperidine-2,6-dionyl). In an embodiment, each of R^{2a} and R^{2b} is independently hydrogen. In an embodiment, n is 1. In an embodiment, R³ is —N(R^{C})(R^{D}) (e.g., —NH₂). In an embodiment, the compound comprises lenalidomide, e.g., 3-(4-amino-1-oxoisoindolin-2-yl)piperidine-2,6-dione, or a pharmaceutically acceptable salt thereof. In an embodiment, the compound is lenalidomide, e.g., according to the following formula:

[chemical structure]

[0810] In an embodiment, X is O. In an embodiment, R¹ is heterocyclyl (e.g., piperidinyl-2,6-dionyl). In some embodiments, R^{2a} and R^{2b} together with the carbon to which they are attached form a carbonyl group. In an embodiment, n is 1. In an embodiment, R³ is —N(R^{C})(R^{D}) (e.g., —NH₂). In an embodiment, the compound comprises pomalidomide, e.g., 4-amino-2-(2,6-dioxopiperidin-3-yl)isoindoline-1,3-dione, or a pharmaceutically acceptable salt thereof. In an embodiment, the compound is pomalidomide, e.g., according to the following formula:

[chemical structure]

[0811] In an embodiment, X is O. In an embodiment, R¹ is heterocyclyl (e.g., piperidinyl-2,6-dionyl). In an embodiment, R^{2a} and R^{2b} together with the carbon to which they are attached form a carbonyl group. In an embodiment, n is 0. In an embodiment, the compound comprises thalidomide, e.g., 2-(2,6-dioxopiperidin-3-yl)isoindoline-1,3-dione, or a pharmaceutically acceptable salt thereof. In an embodiment, the product is thalidomide, e.g., according to the following formula:

[chemical structure]

[0812] In an embodiment, X is O. In an embodiment, R¹ is heterocyclyl (e.g., piperidine-2,6-dionyl). In an embodiment, each of R²⁸ and R^{b} is independently hydrogen. In an embodiment, n is 1. In an embodiment, R³ is C₁-C₆ heteroalkyl (e.g., CH₂NHC(O)CH₂-phenyl-t-butyl) In an embodiment, the compound comprises 2-(4-(tert-butyl)phenyl)-N-((2-(2,6-dioxopiperidin-3-yl)-1-oxoisoindolin-5-yl)methyl)acetamide, or a pharmaceutically acceptable salt thereof. In an embodiment, the compound has the structure as shown in the following formula:

[chemical structure]

[0813] In some embodiments, the compound is a compound of Formula (1-a):

[chemical structure]

[0814] or a pharmaceutically acceptable salt, ester, hydrate, or tautomer thereof, where:

[0815] Ring A is carbocyclyl, heterocyclyl, aryl, or heteroaryl, each of which optionally substituted with one or more R⁴;
[0816] M is absent, C₁-C₆ alkyl, C₂-C₆ alkenyl, C₂-C₆ alkynyl, or C₁-C₆ heteroalkyl, where each alkyl, alkenyl, alkynyl, and heteroalkyl is optionally substituted with one or more R⁴;
[0817] each of R^{2a} and R^{2b} is independently hydrogen or C₁-C₆ alkyl; or R^{2a} and R^{2b} together with the carbon atom to which they are attached to form a carbonyl group or thiocarbonyl group;
[0818] R^{3a} is hydrogen, C₁-C₆ alkyl, C₂-C₆ alkenyl, C₂-C₆ alkynyl, C₁-C₆ heteroalkyl, halo, cyano, —C(O)R^{A}, —C(O)OR^{B}, —OR^{B}, —N(R^{C})(R^{D}), —C(O)N(R^{C})(R^{D}), —N(R^{C})C(O)R^{A}, —S(O)ₓR^{E}, —S(O)ₓN(R^{C})(R^{D}), or —N(R^{C})S(O)ₓR^{E}, where each alkyl, alkenyl, alkynyl, and heteroalkyl is optionally substituted with one or more R⁶;
[0819] each of R³ is independently C₁-C₆ alkyl, C₂-C₆ alkenyl, C₂-C₆ alkynyl, C₁-C₆ heteroalkyl, halo, cyano, —C(O)R^{A}, —C(O)OR^{B}, —OR^{B}, —N(R^{C})(R^{D}), —C(O)N(R^{C})(R^{D}), —N(R^{C})C(O)R^{A}, —S(O)ₓR^{E}, —S(O)ₓN(R^{C})(R^{D}), or —N(R^{C})S(O)ₓR^{E}, where each alkyl, alkenyl, alkynyl, and heteroalkyl is independently and optionally substituted with one or more R⁶;
[0820] each R⁴ is independently C₁-C₆ alkyl, C₂-C₆ alkenyl, C₂-C₆ alkynyl, C₁-C₆ heteroalkyl, halo, cyano, oxo, —C(O)R^{A}, —C(O)OR^{B}, —OR^{B}, —N(R^{C})(R^{D}), —C(O)N(R^{C})(R^{D}), —N(R^{C})C(O)R^{A}, S(O)ₓR^{E}, —S(O)ₓN(R^{C})(R^{D}), —N(RC)S(O)ₓR^{E}, carbocyclyl, heterocyclyl, aryl, or heteroaryl, where each alkyl, alkenyl, alkynyl, carbocyclyl, heterocyclyl, aryl, or heteroaryl is independently and optionally substituted with one or more R⁷;
[0821] each of R^{A}, R^{B}, R^{C}, R^{D}, and R^{E} is independently hydrogen or C₁-C₆ alkyl;
[0822] each R⁶ is independently C₁-C₆ alkyl, oxo, cyano, —OR^{B}, —N(R^{C})(R^{D}), —C(O)N(R^{C})(R^{D}), —N(R^{C})C(O)R^{A}, aryl, or heteroaryl, where each aryl or heteroaryl is independently and optionally substituted with one or more R⁸;
[0823] each R⁷ is independently halo, oxo, cyano, —OR^{B}, —N(R^{C})(R^{D}), —C(O)N(R^{C})(R^{D}), or —N(R^{C})C(O)R^{A};
[0824] each R⁸ is independently C₁-C₆ alkyl, cyano, —OR^{B}, —N(R^{C})(R^{D}), —C(O)N(R^{C})(R^{D}), or —N(R^{C})C(O)R^{A};
[0825] n is 0, 1, 2, or 3;
[0826] is 0, 1, 2, 3, 4, or 5; and
[0827] x is 0, 1, or 2.

[0828] In some embodiments, X is O.

[0829] In some embodiments, M is absent.

[0830] In some embodiments, Ring A is heterocyclyl. In some embodiments, Ring A is heterocyclyl, e.g., a 6-membered heterocyclyl or a 5-membered heterocyclyl. In some embodiments, Ring A is a nitrogen-containing heterocyclyl. In some embodiments, Ring A is piperidinyl (e.g., piperidine-2,6-dionyl).

[0831] In some embodiments, M is absent and Ring A is heterocyclyl (e.g., piperidinyl, e.g., piperidine-2,6-dionyl).

[0832] In some embodiments, each of R^{2a} and R^{2b} is independently hydrogen. In some embodiments, R^{2a} and R^{2b} together with the carbon to which they are attached form a carbonyl group.

[0833] In some embodiments, R^{3a} is hydrogen, —N(R^{C})(R^{D}) or —N(R^{C})C(O)R^{A}. In some embodiments, R^{3a} is hydrogen. In some embodiments, R^{3a} is —N(R^{C})(R^{D}) (e.g., —NH₂). In some embodiments, R^{3a} is —N(R^{C})C(O)R^{A} (e.g, NHC(O)CH₃).

[0834] In some embodiments, R³ is C₁-C₆ heteroalkyl (e.g., CH₂NHC(O)CH₂-phenyl-t-butyl). In some embodiments, n is 0 or 1. In some embodiments, n is 0. In some embodiments, n is 1.

[0835] The compound can comprise one or more chiral centers or exist as one or more stereoisomers. In some embodiments, the compound comprises a single chiral center and is a mixture of stereoisomers, e.g., an R stereoisomer and an S stereoisomer. In some embodiments, the mixture comprises a ratio of R stereoisomers to S stereoisomers, for example, about a 1:1 ratio of R stereoisomers to S stereoisomers (i.e., a racemic mixture). In some embodiments, the mixture comprises a ratio of R stereoisomers to S stereoisomers of about 51:49, about 52:48, about 53:47, about 54:46, about 55:45, about 60:40, about 65:35, about 70:30, about 75:25, about 80:20, about 85:15, about 90:10, about 95:5, or about 99:1. In some embodiments, the mixture comprises a ratio of S stereoisomers to R stereoisomers of about 51:49, about 52: 48, about 53:47, about 54:46, about 55:45, about 60:40, about 65:35, about 70:30, about 75:25, about 80:20, about 85:15, about 90:10, about 95:5, or about 99:1. In some embodiments, the compound is a single stereoisomer of Formula (1) or Formula (1-a), e.g., a single R stereoisomer or a single S stereoisomer.

[0836] In some embodiments, the CD19 binding molecule is administered in combination with a kinase inhibitor. In one embodiment, the kinase inhibitor is a PI3-kinase inhibitor, e.g., CLR457, BGT226, or BYL719. In one embodiment, the kinase inhibitor is a CDK4 inhibitor, e.g., a CDK4 inhibitor described herein, e.g., a CDK4/6 inhibitor, such as, e.g., 6-Acetyl-8-cyclopentyl-5-methyl-2-(5-piperazin-1-yl-pyridin-2-ylamino)-8H-pyrido[2,3-d]pyrimidin-7-one, hydrochloride (also referred to as palbociclib or PD0332991). In one embodiment, the kinase inhibitor is a BTK inhibitor, e.g., a BTK inhibitor described herein, such as, e.g., ibrutinib. In one embodiment, the kinase inhibitor is an mTOR inhibitor, e.g., an mTOR inhibitor described herein, such as, e.g., rapamycin, a rapamycin analog, OSI-027. The mTOR inhibitor can be, e.g., an mTORC1 inhibitor and/or an mTORC2 inhibitor, e.g., an mTORC1 inhibitor and/or mTORC2 inhibitor described herein. In one embodiment, the kinase inhibitor is a MNK inhibitor, e.g., a MNK inhibitor described herein, such as, e.g., 4-amino-5-(4-fluoroanilino)-pyrazolo [3,4-d] pyrimidine. The MNK inhibitor can be, e.g., a MNK1a, MNK1b, MNK2a and/or MNK2b inhibitor. In one embodiment, the kinase inhibitor is a dual PI3K/mTOR inhibitor described herein, such as, e.g., PF-04695102. In one embodiment, the kinase inhibitor is a DGK inhibitor, e.g., a DGK inhibitor described herein, such as, e.g., DGKinh1 (D5919) or DGKinh2 (D5794).

[0837] In one embodiment, the kinase inhibitor is a BTK inhibitor selected from ibrutinib (PCI-32765); GDC-0834; RN-486; CGI-560; CGI-1764; HM-71224; CC-292; ONO-4059; CNX-774; and LFM-A13. In an embodiment, the BTK inhibitor does not reduce or inhibit the kinase activity of interleukin-2-inducible kinase (ITK), and is selected from GDC-0834; RN-486; CGI-560; CGI-1764; HM-71224; CC-292; ONO-4059; CNX-774; and LFM-A13.

[0838] In one embodiment, the kinase inhibitor is a BTK inhibitor, e.g., ibrutinib (PCI-32765). In some embodiments, a CD19 binding molecule is administered to a subject in combination with a BTK inhibitor (e.g., ibrutinib). In embodiments, a CD19 binding molecule is administered to a subject in combination with ibrutinib (also called PCI-32765) (e.g., to a subject having CLL, mantle cell lymphoma (MCL), or small lymphocytic lymphoma (SLL). For example, the subject can have a deletion in the short arm of chromosome 17 (del(17p), e.g., in a leukemic cell). In other examples, the subject does not have a del(17p). In some embodiments, the subject has relapsed CLL or SLL, e.g., the subject has previously been administered a cancer therapy (e.g., previously been administered one, two, three, or four prior cancer therapies). In some embodiments, the subject has refractory CLL or SLL. In other embodiments, the subject has follicular lymphoma, e.g., relapse or refractory follicular lymphoma. In some embodiments, ibrutinib is administered at a dosage of about 300-600 mg/day (e.g., about 300-350, 350-400, 400-450, 450-500, 500-550, or 550-600 mg/day, e.g., about 420 mg/day or about 560 mg/day), e.g., orally. In some embodiments, the ibrutinib is administered at a dose of about 250 mg, 300 mg, 350 mg, 400 mg, 420 mg, 440 mg, 460 mg, 480 mg, 500 mg, 520 mg, 540 mg, 560 mg, 580 mg, 600 mg (e.g., 250 mg, 420 mg or 560 mg) daily for a period of time, e.g., daily for 21 day cycle, or daily for 28 day cycle. In one embodiment, 1, 2, 3, 4, 5, 6, 7, 8, 9, 10, 11, 12 or more cycles of ibrutinib are administered. In some embodiments, ibrutinib is administered in combination with rituximab. See, e.g., Burger et al., 2013. Ibrutinib In Combination With Rituximab (iR) Is Well Tolerated and Induces a High Rate Of Durable Remissions In Patients With High-Risk Chronic Lymphocytic Leukemia (CLL): New, Updated Results Of a Phase II Trial In 40 Patients, Abstract 675 presented at 55^{th} ASH Annual Meeting and Exposition, New Orleans, LA 7-10 December Without being bound by theory, it is thought that the addition of ibrutinib enhances the T cell proliferative response and can shift T cells from a T-helper-2 (Th2) to T-helper-1 (Th1) phenotype. Th1 and Th2 are phenotypes of helper T cells, with Th1 versus Th2 directing different immune response pathways. A Th1 phenotype is associated with proinflammatory responses, e.g., for killing cells, such as intracellular pathogens/viruses or cancerous cells, or perpetuating autoimmune responses. A Th2 phenotype is associated with eosinophil accumulation and anti-inflammatory responses.

[0839] In some embodiments, the CD19 binding molecule is administered in combination with an inhibitor of Epidermal Growth Factor Receptor (EGFR).

[0840] In some embodiments, the EGFR inhibitor is (R,E)-N-(7-chloro-1-(1-(4-(dimethylamino)but-2-enoyl)azepan-3-yl)-1H-benzo[d]imidazol-2-yl)-2-methylisonicotinamide (Compound A40) or a compound disclosed in PCT Publication No. WO 2013/184757.

[0841] In some embodiments, the EGFR inhibitor, e.g., (R,E)-N-(7-chloro-1-(1-(4-(dimethylamino)but-2-enoyl)azepan-3-yl)-1H-benzo[d]imidazol-2-yl)-2-methylisonicotinamide (Compound A40) or a compound disclosed in PCT Publication No. WO 2013/184757, is administered at a dose of 150-250 mg, e.g., per day. In some embodiments, the EGFR inhibitor, e.g., (R,E)-N-(7-chloro-1-(1-(4-(dimethylamino)but-2-enoyl)azepan-3-yl)-1H-benzo[d]imidazol-2-yl)-2-methylisonicotinamide (Compound A40) or a compound disclosed in PCT Publication No. WO 2013/184757, is administered at a dose of about 150, 200, or 250 mg, or about 150-200 or 200-250 mg.

[0842] In some embodiments, the EGFR inhibitor, (R,E)-N-(7-chloro-1-(1-(4-(dimethylamino)but-2-enoyl)azepan-3-yl)-1H-benzo[d]imidazol-2-yl)-2-methylisonicotinamide (Compound A40), or a compound disclosed in PCT Publication No. WO 2013/184757, is a covalent, irreversible tyrosine kinase inhibitor. In certain embodiments, the EGFR inhibitor, (R,E)-N-(7-chloro-1-(1-(4-(dimethylamino)but-2-enoyl)azepan-3-yl)-1H-benzo[d]imidazol-2-yl)-2-methylisonicotinamide (Compound A40), or a compound disclosed in PCT Publication No. WO 2013/184757 inhibits activating EGFR mutations (L858R, ex19del). In other embodiments, the EGFR inhibitor, (R,E)-N-(7-chloro-1-(1-(4-(dimethylamino)but-2-enoyl)azepan-3-yl)-1H-benzo[d]imidazol-2-yl)-2-methylisonicotinamide (Compound A40), or a compound disclosed in PCT Publication No. WO 2013/184757 does not inhibit, or does not substantially inhibit, wild-type (wt) EGFR. Compound A40 has shown efficacy in EGFR mutant NSCLC patients. In some embodiments, the EGFR inhibitor, (R,E)-N-(7-chloro-1-(1-(4-(dimethylamino)but-2-enoyl)azepan-3-yl)-1H-benzo[d]imidazol-2-yl)-2-methylisonicotinamide (Compound A40), or a compound disclosed in PCT Publication No. WO 2013/184757 also inhibits one or more kinases in the TEC family of kinases. The Tec family kinases include, e.g., ITK, BMX, TEC, RLK, and BTK, and are central in the propagation of T-cell receptor and chemokine receptor signaling (Schwartzberg et al. (2005) Nat. Rev. Immunol. p. 284-95). For example, Compound A40 can inhibit ITK with a biochemical IC50 of 1.3 nM. ITK is a critical enzyme for the survival of Th2 cells and its inhibition results in a shift in the balance between Th2 and Th1 cells.

[0843] In some embodiments, the EGFR inhibitor is chosen from one of more of erlotinib, gefitinib, cetuximab, panitumumab, necitumumab, PF-00299804, nimotuzumab, or RO5083945.

[0844] In some embodiments, the CD19 binding molecule is administered in combination with an adenosine A2A receptor (A2AR) antagonist. Exemplary A2AR antagonists include, e.g., PBF509 (Palobiofarma/Novartis), CPI444N81444 (Corvus/Genentech), AZD4635/HTL-1071 (AstraZeneca/Heptares), Vipadenant (Redox/Juno), GBV-2034 (Globavir), AB928 (Arcus Biosciences), Theophylline, Istradefylline (Kyowa Hakko Kogyo), Tozadenant/SYN-115 (Acorda), KW-6356 (Kyowa Hakko Kogyo), ST-4206 (Leadiant Biosciences), Preladenant/SCH 420814 (Merck/Schering), and NIR178 (Novartis).

[0845] In certain embodiments, the A2AR antagonist is PBF509. PBF509 and other A2AR antagonists are disclosed in U.S. Pat. No. 8,796,284 and WO 2017/025918. In certain embodiments, the A2AR antagonist is 5-bromo-2,6-di-(1H-pyrazol-1-yl)pyrimidine-4-amine. In certain embodiments, the A2AR antagonist has the following structure:

[chemical structure]

[0846] In certain embodiments, the A2AR antagonist is CPI444/V81444. CPI-444 and other A2AR antagonists are disclosed in WO 2009/156737. In certain embodiments, the A2AR antagonist is (S)-7-(5-methylfuran-2-yl)-3-((6-(((tetrahydrofuran-3-yl)oxy)methyl)pyridin-2-yl)methyl)-3H-[1,2,3]triazolo[4,5-d]pyrimidin-5-amine. In certain embodiments, the A2AR antagonist is (R)-7-(5-methylfuran-2-yl)-3-((6-(((tetrahydrofuran-3-yl)oxy)methyl)pyridin-2-yl)methyl)-3H-[1,2,3]triazolo[4,5-d]pyrimidin-5-amine, or racemate thereof. In certain embodiments, the A2AR antagonist is 7-(5-methylfuran-2-yl)-3-((6-(((tetrahydrofuran-3-yl)oxy)methyl)pyridin-2-yl)methyl)-3H-[1,2,3]triazolo[4,5-d]pyrimidin-5-amine. In certain embodiments, the A2AR antagonist has the following structure:

[chemical structure]

[0847] In certain embodiments, the A2AR antagonist is AZD4635/HTL-1071. A2AR antagonists are disclosed in WO 2011/095625. In certain embodiments, the A2AR antagonist is 6-(2-chloro-6-methylpyridin-4-yl)-5-(4-fluorophenyl)-1,2,4-triazin-3-amine. In certain embodiments, the A2AR antagonist has the following structure:

[chemical structure]

[0848] In certain embodiments, the A2AR antagonist is ST-4206 (Leadiant Biosciences). In certain embodiments, the A2AR antagonist is an A2AR antagonist described in U.S. Pat. No. 9,133,197. In certain embodiments, the A2AR antagonist has the following structure:

[chemical structure]

[0849] In certain embodiments, the A2AR antagonist is an A2AR antagonist described in U.S. Pat. Nos. 8,114,845, 9,029,393, US20170015758, or US20160129108.

[0850] In certain embodiments, the A2AR antagonist is istradefylline (CAS Registry Number 155270-99-8). Istradefylline is also known as KW-6002 or 8-[(E)-2-(3,4-dimethoxyphenyl)vinyl]-1,3-diethyl-7-methyl-3,7-dihydro-1H-purine-2,6-dione. Istradefylline is disclosed, e.g., in LeWitt et al. (2008) Annals of Neurology 63 (3): 295-302).

[0851] In certain embodiments, the A2aR antagonist is tozadenant (Biotie). Tozadenant is also known as SYN115 or 4-hydroxy-N-(4-methoxy-7-morpholin-4-yl-1,3-benzothiazol-2-yl)-4-methylpiperidine-1-carboxamide. Tozadenant blocks the effect of endogenous adenosine at the A2a receptors, resulting in the potentiation of the effect of dopamine at the D2 receptor and inhibition of the effect of glutamate at the mGluR5 receptor. In some embodiments, the A2aR antagonist is preladenant (CAS Registry Number 377727-87-2). Preladenant is also known as SCH 420814 or 2-(2-Furanyl)-7-[2-[4-[4-(2-methoxyethoxy)phenyl]-1-piperazinyl]ethyl]7H-pyrazolo[4,3-e][1,2,4]triazolo[1,5-c]pyrimidine-5-amine. Preladenant was developed as a drug that acted as a potent and selective antagonist at the adenosine A2A receptor.

[0852] In certain embodiments, the A2aR antagonist is vipadenan. Vipadenan is also known as BIIB014, V2006, or 3-[(4-amino-3-methylphenyl)methyl]-7-(furan-2-yl)triazolo[4,5-d]pyrimidin-5-amine.

[0853] Other exemplary A2aR antagonists include, e.g., ATL-444, MSX-3, SCH-58261, SCH-412,348, SCH-442,416, VER-6623, VER-6947, VER-7835, CGS-15943, or ZM-241,385.

[0854] In some embodiments, the A2aR antagonist is an A2aR pathway antagonist (e.g., a CD-73 inhibitor, e.g., an anti-CD73 antibody) is MED19447. MED19447 is a monoclonal antibody specific for CD73. Targeting the extracellular production of adenosine by CD73 can reduce the immunosuppressive effects of adenosine. MED19447 was reported to have a range of activities, e.g., inhibition of CD73 ectonucleotidase activity, relief from AMP-mediated lymphocyte suppression, and inhibition of syngeneic tumor growth. MED19447 can drive changes in both myeloid and lymphoid infiltrating leukocyte populations within the tumor microenvironment. These changes include, e.g., increases in CD8 effector cells and activated macrophages, as well as a reduction in the proportions of myeloid-derived suppressor cells (MDSC) and regulatory T lymphocytes.

[0855] In some embodiments, the CD19 binding molecule is administered in combination with a CD20 inhibitor.

[0856] In one embodiment, the CD20 inhibitor is an anti-CD20 antibody or fragment thereof. In an embodiment, the antibody is a monospecific antibody and in another embodiment, the antibody is a bispecific antibody. In an embodiment, the CD20 inhibitor is a chimeric mouse/human monoclonal antibody, e.g., rituximab. In an embodiment, the CD20 inhibitor is a human monoclonal antibody such as ofatumumab. In an embodiment, the CD20 inhibitor is a humanized antibody such as ocrelizumab, veltuzumab, obinutuzumab, ocaratuzumab, or PRO131921 (Genentech). In an embodiment, the CD20 inhibitor is a fusion protein comprising a portion of an anti-CD20 antibody, such as TRU-015 (Trubion Pharmaceuticals).

[0857] In some embodiments, the CD19 binding molecule is administered in combination with a CD22 inhibitor. In some embodiments, the CD22 inhibitor is a small molecule or an anti-CD22 antibody molecule. In some embodiments, the antibody is a monospecific antibody, optionally conjugated to a second agent such as a chemotherapeutic agent. For instance, in an embodiment, the antibody is an anti-CD22 monoclonal antibody-MMAE conjugate (e.g., DCDT2980S). In an embodiment, the antibody is an scFv of an anti-CD22 antibody, e.g., an scFv of antibody RFB4. This scFv can be fused to all of or a fragment of Pseudomonas exotoxin-A (e.g., BL22). In an embodiment, the antibody is a humanized anti-CD22 monoclonal antibody (e.g., epratuzumab). In an embodiment, the antibody or fragment thereof comprises the Fv portion of an anti-CD22 antibody, which is optionally covalently fused to all or a fragment or (e.g., a 38 KDa fragment of) Pseudomonas exotoxin-A (e.g., moxetumomab pasudotox). In an embodiment, the anti-CD22 antibody is an anti-CD19/CD22 bispecific antibody, optionally conjugated to a toxin. For instance, in one embodiment, the anti-CD22 antibody comprises an anti-CD19/CD22 bispecific portion, (e.g., two scFv ligands, recognizing human CD19 and CD22) optionally linked to all of or a portion of diphtheria toxin (DT), e.g., first 389 amino acids of diphtheria toxin (DT), DT 390, e.g., a ligand-directed toxin such as DT2219ARL). In another embodiment, the bispecific portion (e.g., anti-CD19/anti-CD22) is linked to a toxin such as deglycosylated ricin A chain (e.g., Combotox).

[0858] In some embodiments, the CD22 inhibitor is a multispecific antibody molecule, e.g., a bispecific antibody molecule, e.g., a bispecific antibody molecule that binds to CD20 and CD3. Exemplary bispecific antibody molecules that bind to CD20 and CD3 are disclosed in WO02016086189 and WO2016182751. In some embodiments, the bispecific antibody molecule that binds to CD20 and CD3 is XENP13676 as disclosed in FIG. 74, SEQ ID NOs: 323, 324, and 325 of WO2016086189.

[0859] In some embodiments, the CD19 binding molecule is administered in combination with a FCRL2 or FCRL5 inhibitor. In some embodiments, the FCRL2 or FCRL5 inhibitor is an anti-FCRL2 antibody molecule, e.g., a bispecific antibody molecule, e.g., a bispecific antibody that binds to FCRL2 and CD3. In some embodiments, the FCRL2 or FCRL5 inhibitor is an anti-FCRL5 antibody molecule, e.g., a bispecific antibody molecule, e.g., a bispecific antibody that binds to FCRL5 and CD3.

[0860] Exemplary anti-FCRL5 antibody molecules are disclosed in US20150098900, US20160368985, WO2017096120 (e.g., antibodies ET200-001, ET200-002, ET200-003, ET200-006, ET200-007, ET200-008, ET200-009, ET200-010, ET200-011, ET200-012, ET200-013, ET200-014, ET200-015, ET200-016, ET200-017, ET200-018, ET200-019, ET200-020, ET200-021, ET200-022, ET200-023, ET200-024, ET200-025, ET200-026, ET200-027, ET200-028, ET200-029, ET200-030, ET200-031, ET200-032, ET200-033, ET200-034, ET200-035, ET200-037, ET200-038, ET200-039, ET200-040, ET200-041, ET200-042, ET200-043, ET200-044, ET200-045, ET200-069, ET200-078, ET200-079, ET200-081, ET200-097, ET200-098, ET200-099, ET200-100, ET200-101, ET200-102, ET200-103, ET200-104, ET200-105, ET200-106, ET200-107, ET200-108, ET200-109, ET200-110, ET200-111, ET200-112, ET200-113, ET200-114, ET200-115, ET200-116, ET200-117, ET200-118, ET200-119, ET200-120, ET200-121, ET200-122, ET200-123, ET200-125, ET200-005 and ET200-124 disclosed in WO2017096120).

[0861] In some embodiments, the CD19 binding molecule is administered in combination with an IL15/IL-15Ra complex. In some embodiments, the IL-15/IL-15Ra complex is chosen from NIZ985 (Novartis), ATL-803 (Altor) or CYP0150 (Cytune).

[0862] In some embodiments, the IL-15/IL-15Ra complex comprises human IL-15 complexed with a soluble form of human IL-15Ra. The complex can comprise IL-15 covalently or noncovalently bound to a soluble form of IL-15Ra. In a particular embodiment, the human IL-15 is noncovalently bonded to a soluble form of IL-15Ra. In a particular embodiment, the human IL-15 of the composition comprises an amino acid sequence as described in WO 2014/066527 and the soluble form of human IL-15Ra comprises an amino acid sequence as described in WO 2014/066527. The molecules described herein can be made by vectors, host cells, and methods described in WO 2007/084342.

[0863] In some embodiments, the IL-15/IL-15Ra complex is ALT-803, an IL-15/IL-15Ra Fc fusion protein (IL-15N72D:IL-15RaSu/Fc soluble complex). ALT-803 is disclosed in WO 2008/143794.

[0864] In some embodiments, the IL-15/IL-15Ra complex comprises IL-15 fused to the sushi domain of IL-15Ra (CYP0150, Cytune). The sushi domain of IL-15Ra refers to a domain beginning at the first cysteine residue after the signal peptide of IL-15Ra, and ending at the fourth cysteine residue after the signal peptide. The complex of IL-15 fused to the sushi domain of IL-15Ra is disclosed in WO 2007/04606 and WO 2012/175222.

[0865] In some embodiments, the CD19 binding molecule is administered in combination with a PD-1 inhibitor. In some embodiments, the PD-1 inhibitor is chosen from PDR001 (Novartis), Nivolumab (Bristol-Myers Squibb), Pembrolizumab (Merck & Co), Pidilizumab (CureTech), MED10680 (Medimmune), REGN2810 (Regeneron), TSR-042 (Tesaro), PF-06801591 (Pfizer), BGB-A317 (Beigene), BGB-108 (Beigene), INCSHR1210 (Incyte), or AMP-224 (Amplimmune). In one embodiment, the PD-1 inhibitor is an anti-PD-1 antibody molecule. In one embodiment, the PD-1 inhibitor is an anti-PD-1 antibody molecule as described in US 2015/0210769.

[0866] In one embodiment, the anti-PD-1 antibody molecule is Nivolumab (Bristol-Myers Squibb), also known as MDX-1106, MDX-1106-04, ONO-4538, BMS-936558, or OPDIVO®. Nivolumab (clone 5C4) and other anti-PD-1 antibodies are disclosed in U.S. Pat. No. 8,008,449 and WO 2006/121168. In one embodiment, the anti-PD-1 antibody molecule comprises one or more of the CDR sequences (or collectively all of the CDR sequences), the heavy chain or light chain variable region sequence, or the heavy chain or light chain sequence of Nivolumab.

[0867] In one embodiment, the anti-PD-1 antibody molecule is Pembrolizumab (Merck & Co), also known as Lambrolizumab, MK-3475, MK03475, SCH-900475, or KEYTRUDA®. Pembrolizumab and other anti-PD-1 antibodies are disclosed in Hamid, O. et al. (2013) New England Journal of Medicine 369 (2): 134-44, U.S. Pat. No. 8,354,509, and WO 2009/114335. In one embodiment, the anti-PD-1 antibody molecule comprises one or more of the CDR sequences (or collectively all of the CDR sequences), the heavy chain or light chain variable region sequence, or the heavy chain or light chain sequence of Pembrolizumab.

[0868] In one embodiment, the anti-PD-1 antibody molecule is Pidilizumab (CureTech), also known as CT-011. Pidilizumab and other anti-PD-1 antibodies are disclosed in Rosenblatt, J. et al. (2011) J Immunotherapy 34(5): 409-18, U.S. Pat. Nos. 7,695,715, 7,332,582, and 8,686,119. In one embodiment, the anti-PD-1 antibody molecule comprises one or more of the CDR sequences (or collectively all of the CDR sequences), the heavy chain or light chain variable region sequence, or the heavy chain or light chain sequence of Pidilizumab.

[0869] In one embodiment, the anti-PD-1 antibody molecule is MED10680 (Medimmune), also known as AMP-514. MED10680 and other anti-PD-1 antibodies are disclosed in U.S. Pat. No. 9,205,148 and WO 2012/145493. In one embodiment, the anti-PD-1 antibody molecule comprises one or more of the CDR sequences (or collectively all of the CDR sequences), the heavy chain or light chain variable region sequence, or the heavy chain or light chain sequence of MED10680.

[0870] In one embodiment, the anti-PD-1 antibody molecule is REGN2810 (Regeneron). In one embodiment, the anti-PD-1 antibody molecule comprises one or more of the CDR sequences (or collectively all of the CDR sequences), the heavy chain or light chain variable region sequence, or the heavy chain or light chain sequence of REGN2810.

[0871] In one embodiment, the anti-PD-1 antibody molecule is PF-06801591 (Pfizer). In one embodiment, the anti-PD-1 antibody molecule comprises one or more of the CDR sequences (or collectively all of the CDR sequences), the heavy chain or light chain variable region sequence, or the heavy chain or light chain sequence of PF-06801591.

[0872] In one embodiment, the anti-PD-1 antibody molecule is BGB-A317 or BGB-108 (Beigene). In one embodiment, the anti-PD-1 antibody molecule comprises one or more of the CDR sequences (or collectively all of the CDR sequences), the heavy chain or light chain variable region sequence, or the heavy chain or light chain sequence of BGB-A317 or BGB-108.

[0873] In one embodiment, the anti-PD-1 antibody molecule is INCSHR1210 (Incyte), also known as INCSHR01210 or SHR-1210. In one embodiment, the anti-PD-1 antibody molecule comprises one or more of the CDR sequences (or collectively all of the CDR sequences), the heavy chain or light chain variable region sequence, or the heavy chain or light chain sequence of INCSHR1210.

[0874] In one embodiment, the anti-PD-1 antibody molecule is TSR-042 (Tesaro), also known as ANB011. In one embodiment, the anti-PD-1 antibody molecule comprises one or more of the CDR sequences (or collectively all of the CDR sequences), the heavy chain or light chain variable region sequence, or the heavy chain or light chain sequence of TSR-042.

[0875] Further known anti-PD-1 antibodies include those described, e.g., in WO 2015/112800, WO 2016/092419, WO 2015/085847, WO 2014/179664, WO 2014/194302, WO 2014/209804, WO 2015/200119, U.S. Pat. Nos. 8,735,553, 7,488,802, 8,927,697, 8,993,731, and 9,102,727.

[0876] In one embodiment, the anti-PD-1 antibody is an antibody that competes for binding with, and/or binds to the same epitope on PD-1 as, one of the anti-PD-1 antibodies described herein.

[0877] In one embodiment, the PD-1 inhibitor is a peptide that inhibits the PD-1 signaling pathway, e.g., as described in U.S. Pat. No. 8,907,053. In one embodiment, the PD-1 inhibitor is an immunoadhesin (e.g., an immunoadhesin comprising an extracellular or PD-1 binding portion of PD-L1 or PD-L2 fused to a constant region (e.g., an Fc region of an immunoglobulin sequence). In one embodiment, the PD-1 inhibitor is AMP-224 (B7-DCIg (Amplimmune), e.g., disclosed in WO 2010/027827 and WO 2011/066342).

[0878] In some embodiments, the CD19 binding molecule is administered in combination with a PD-L1 inhibitor. In some embodiments, the PD-L1 inhibitor is chosen from FAZ053 (Novartis), Atezolizumab (Genentech/Roche), Avelumab (Merck Serono and Pfizer), Durvalumab (MedImmune/AstraZeneca), or BMS-936559 (Bristol-Myers Squibb).

[0879] In one embodiment, the PD-L1 inhibitor is an anti-PD-L1 antibody molecule. In one embodiment, the PD-L1 inhibitor is an anti-PD-L1 antibody molecule as disclosed in US 2016/0108123.

[0880] In one embodiment, the anti-PD-L1 antibody molecule is Atezolizumab (Genentech/Roche), also known as MPDL3280A, RG7446, RO5541267, YW243.55.S70, or TECENTRIQ™. Atezolizumab and other anti-PD-L1 antibodies are disclosed in U.S. Pat. No. 8,217,149. In one embodiment, the anti-PD-L1 antibody molecule comprises one or more of the CDR sequences (or collectively all of the CDR sequences), the heavy chain or light chain variable region sequence, or the heavy chain or light chain sequence of Atezolizumab.

[0881] In one embodiment, the anti-PD-L1 antibody molecule is Avelumab (Merck Serono and Pfizer), also known as MSB0010718C. Avelumab and other anti-PD-L1 antibodies are disclosed in WO 2013/079174. In one embodiment, the anti-PD-L1 antibody molecule comprises one or more of the CDR sequences (or collectively all of the CDR sequences), the heavy chain or light chain variable region sequence, or the heavy chain or light chain sequence of Avelumab.

[0882] In one embodiment, the anti-PD-L1 antibody molecule is Durvalumab (MedImmune/AstraZeneca), also known as MED14736. Durvalumab and other anti-PD-L1 antibodies are disclosed in U.S. Pat. No. 8,779,108. In one embodiment, the anti-PD-L1 antibody molecule comprises one or more of the CDR sequences (or collectively all of the CDR sequences), the heavy chain or light chain variable region sequence, or the heavy chain or light chain sequence of Durvalumab.

[0883] In one embodiment, the anti-PD-L1 antibody molecule is BMS-936559 (Bristol-Myers Squibb), also known as MDX-1105 or 12A4. BMS-936559 and other anti-PD-L1 antibodies are disclosed in U.S. Pat. No. 7,943,743 and WO 2015/081158. In one embodiment, the anti-PD-L1 antibody molecule comprises one or more of the CDR sequences (or collectively all of the CDR sequences), the heavy chain or light chain variable region sequence, or the heavy chain or light chain sequence of BMS-936559.

[0884] Further known anti-PD-L1 antibodies include those described, e.g., in WO 2015/181342, WO 2014/100079, WO 2016/000619, WO 2014/022758, WO 2014/055897, WO 2015/061668, WO 2013/079174, WO 2012/145493, WO 2015/112805, WO 2015/109124, WO 2015/195163, U.S. Pat. Nos. 8,168,179, 8,552,154, 8,460,927, and 9,175,082.

[0885] In some embodiments, the CD19 binding molecule is administered in combination with a LAG-3 inhibitor. In some embodiments, the LAG-3 inhibitor is chosen from LAG525 (Novartis), BMS-986016 (Bristol-Myers Squibb), or TSR-033 (Tesaro).

[0886] In one embodiment, the LAG-3 inhibitor is an anti-LAG-3 antibody molecule. In one embodiment, the LAG-3 inhibitor is an anti-LAG-3 antibody molecule as disclosed in US 2015/0259420.

[0887] In one embodiment, the anti-LAG-3 antibody molecule is BMS-986016 (Bristol-Myers Squibb), also known as BMS986016. BMS-986016 and other anti-LAG-3 antibodies are disclosed in WO 2015/116539 and U.S. Pat. No. 9,505,839. In one embodiment, the anti-LAG-3 antibody molecule comprises one or more of the CDR sequences (or collectively all of the CDR sequences), the heavy chain or light chain variable region sequence, or the heavy chain or light chain sequence of BMS-986016.

[0888] In one embodiment, the anti-LAG-3 antibody molecule is TSR-033 (Tesaro). In one embodiment, the anti-LAG-3 antibody molecule comprises one or more of the CDR sequences (or collectively all of the CDR sequences), the heavy chain or light chain variable region sequence, or the heavy chain or light chain sequence of TSR-033.

[0889] In one embodiment, the anti-LAG-3 antibody molecule is IMP731 or GSK2831781 (GSK and Prima BioMed). IMP731 and other anti-LAG-3 antibodies are disclosed in WO 2008/132601 and U.S. Pat. No. 9,244,059. In one embodiment, the anti-LAG-3 antibody molecule comprises one or more of the CDR sequences (or collectively all of the CDR sequences), the heavy chain or light chain variable region sequence, or the heavy chain or light chain sequence of IMP731. In one embodiment, the anti-LAG-3 antibody molecule comprises one or more of the CDR sequences (or collectively all of the CDR sequences), the heavy chain or light chain variable region sequence, or the heavy chain or light chain sequence of GSK2831781.

[0890] Further known anti-LAG-3 antibodies include those described, e.g., in WO 2008/132601, WO 20101019570, WO 2014/140180, WO 2015/116539, WO 2015/200119, WO 2016/028672, U.S. Pat. Nos. 9,244,059, 9,505,839.

[0891] In one embodiment, the anti-LAG-3 inhibitor is a soluble LAG-3 protein, e.g., IMP321 (Prima BioMed), e.g., as disclosed in WO 2009/044273.

[0892] In some embodiments, the CD19 binding molecule is administered in combination with a TIM-3 inhibitor. In some embodiments, the TIM-3 inhibitor is MBG453 (Novartis) or TSR-022 (Tesaro).

[0893] In one embodiment, the TIM-3 inhibitor is an anti-TIM-3 antibody molecule. In one embodiment, the TIM-3 inhibitor is an anti-TIM-3 antibody molecule as disclosed in US 2015/0218274.

[0894] In one embodiment, the anti-TIM-3 antibody molecule is TSR-022 (AnaptysBio/Tesaro). In one embodiment, the anti-TIM-3 antibody molecule comprises one or more of the CDR sequences (or collectively all of the CDR sequences), the heavy chain or light chain variable region sequence, or the heavy chain or light chain sequence of TSR-022. In one embodiment, the anti-TIM-3 antibody molecule comprises one or more of the CDR sequences (or collectively all of the CDR sequences), the heavy chain or light chain variable region sequence, or the heavy chain or light chain sequence of APE5137 or APE5121. APE5137, APE5121, and other anti-TIM-3 antibodies are disclosed in WO 2016/161270.

[0895] In one embodiment, the anti-TIM-3 antibody molecule is the antibody clone F38-2E2. In one embodiment, the anti-TIM-3 antibody molecule comprises one or more of the CDR sequences (or collectively all of the CDR sequences), the heavy chain or light chain variable region sequence, or the heavy chain or light chain sequence of F38-2E2.

[0896] Further known anti-TIM-3 antibodies include those described, e.g., in WO 2016/111947, WO 2016/071448, WO 2016/144803, U.S. Pat. Nos. 8,552,156, 8,841,418, and 9,163,087.

[0897] In one embodiment, the anti-TIM-3 antibody is an antibody that competes for binding with, and/or binds to the same epitope on TIM-3 as, one of the anti-TIM-3 antibodies described herein.

[0898] In some embodiments, the CD19 binding molecule is administered in combination with a transforming growth factor beta (TGF-β) inhibitor. In some embodiments, the TGF-β inhibitor is fresolimumab (CAS Registry Number-948564-73-6). Fresolimumab is also known as GC1008. Fresolimumab is a human monoclonal antibody that binds to and inhibits TGF-beta isoforms 1, 2 and 3. Fresolimumab is disclosed, e.g., in WO 2006/086469, U.S. Pat. Nos. 8,383,780, and 8,591,901.

[0899] In some embodiments, the TGF-β inhibitor is XOMA 089. XOMA 089 is also known as XPA.42.089. XOMA 089 is a fully human monoclonal antibody that binds and neutralizes TGF-beta 1 and 2 ligands, and is disclosed in PCT Publication No. WO 2012/167143.

[0900] In some embodiments, the CD19 binding molecule is administered in combination with an anti-CD73 antibody molecule. In one embodiment, an anti-CD73 antibody molecule is a full antibody molecule or an antigen-binding fragment thereof. In certain embodiments, the anti-CD73 antibody molecule binds to a CD73 protein and reduces, e.g., inhibits or antagonizes, an activity of CD73, e.g., human CD73.

[0901] In one embodiment, the anti-CD73 antibody molecule is an anti-CD73 antibody disclosed in WO2016/075099. In one embodiment, the anti-CD73 antibody molecule is MEDI 9447, e.g., as disclosed in WO2016/075099. Alternative names for MEDI 9447 include clone 10.3 or 73combo3. MEDI 9447 is an IgG1 antibody that inhibits, e.g., antagonizes, an activity of CD73. MEDI 9447 and other anti-CD73 antibody molecules are also disclosed in WO02016/075176 and US2016/0129108.

[0902] In one embodiment, the anti-CD73 antibody molecule comprises a heavy chain variable domain, a light chain variable domain, or both, of MEDI 9477.

[0903] In one embodiment, the anti-CD73 antibody molecule is an anti-CD73 antibody disclosed in WO2016/081748. In one embodiment, the anti-CD73 antibody molecule is 11F11, e.g., as disclosed in WO2016/081748. 11F11 is an IgG2 antibody that inhibits, e.g., antagonizes, an activity of CD73. Antibodies derived from 11F11, e.g., CD73.4, and CD73.10; clones of 11F11, e.g., 11F11-1 and 11F11-2; and other anti-CD73 antibody molecules are disclosed in WO2016/081748 and U.S. Pat. No. 9,605,080.

[0904] In one embodiment, the anti-CD73 antibody molecule comprises a heavy chain variable domain, a light chain variable domain, or both, of 11F11-1 or 11F11-2.

[0905] In one embodiment, the anti-CD73 antibody molecule is an anti-CD73 antibody disclosed in e.g., U.S. Pat. No. 9,605,080.

[0906] In one embodiment, the anti-CD73 antibody molecule is CD73.4, e.g., as disclosed in U.S. Pat. No. 9,605,080. In one embodiment, the anti-CD73 antibody molecule comprises a heavy chain variable domain, a light chain variable domain, or both, of CD73.4.

[0907] In one embodiment, the anti-CD73 antibody molecule is CD73.10, e.g., as disclosed in U.S. Pat. No. 9,605,080. In one embodiment, the anti-CD73 antibody molecule comprises a heavy chain variable domain, a light chain variable domain, or both, of CD73.10.

[0908] In one embodiment, the anti-CD73 antibody molecule is an anti-CD73 antibody disclosed in WO2009/0203538. In one embodiment, the anti-CD73 antibody molecule is 067-213, e.g., as disclosed in WO2009/0203538.

[0909] In one embodiment, the anti-CD73 antibody molecule comprises a heavy chain variable domain, a light chain variable domain, or both, of 067-213.

[0910] In one embodiment, the anti-CD73 antibody molecule is an anti-CD73 antibody disclosed in U.S. Pat. No. 9,090,697. In one embodiment, the anti-CD73 antibody molecule is TY/23, e.g., as disclosed in U.S. Pat. No. 9,090,697. In one embodiment, the anti-CD73 antibody molecule comprises a heavy chain variable domain, a light chain variable domain, or both, of TY/23.

[0911] In one embodiment, the anti-CD73 antibody molecule is an anti-CD73 antibody disclosed in WO2016/055609. In one embodiment, the anti-CD73 antibody molecule comprises a heavy chain variable domain, a light chain variable domain, or both, of an anti-CD73 antibody disclosed in WO2016/055609.

[0912] In one embodiment, the anti-CD73 antibody molecule is an anti-CD73 antibody disclosed in WO2016/146818. In one embodiment, the anti-CD73 antibody molecule comprises a heavy chain variable domain, a light chain variable domain, or both, of an anti-CD73 antibody disclosed in WO2016/146818.

[0913] In one embodiment, the anti-CD73 antibody molecule is an anti-CD73 antibody disclosed in WO2004/079013. In one embodiment, the anti-CD73 antibody molecule comprises a heavy chain variable domain, a light chain variable domain, or both, of an anti-CD73 antibody disclosed in WO2004/079013.

[0914] In one embodiment, the anti-CD73 antibody molecule is an anti-CD73 antibody disclosed in WO2012/125850. In one embodiment, the anti-CD73 antibody molecule comprises a heavy chain variable domain, a light chain variable domain, or both, of an anti-CD73 antibody disclosed in WO2012/125850.

[0915] In one embodiment, the anti-CD73 antibody molecule is an anti-CD73 antibody disclosed in WO2015/004400. In one embodiment, the anti-CD73 antibody molecule comprises a heavy chain variable domain, a light chain variable domain, or both, of an anti-CD73 antibody disclosed in WO2015/004400.

[0916] In one embodiment, the anti-CD73 antibody molecule is an anti-CD73 antibody disclosed in WO2007/146968. In one embodiment, the anti-CD73 antibody molecule comprises a heavy chain variable domain, a light chain variable domain, or both, of an anti-CD73 antibody disclosed in WO2007146968.

[0917] In one embodiment, the anti-CD73 antibody molecule is an anti-CD73 antibody disclosed in US2007/0042392. In one embodiment, the anti-CD73 antibody molecule comprises a heavy chain variable domain, a light chain variable domain, or both, of an anti-CD73 antibody disclosed in US2007/0042392.

[0918] In one embodiment, the anti-CD73 antibody molecule is an anti-CD73 antibody disclosed in US2009/0138977. In one embodiment, the anti-CD73 antibody molecule comprises a heavy chain variable domain, a light chain variable domain, or both, of an anti-CD73 antibody disclosed in US2009/0138977.

[0919] In one embodiment, the anti-CD73 antibody molecule is an anti-CD73 antibody disclosed in Flocke et al., Eur J Cell Biol. 1992 June; 58(1):62-70. In one embodiment, the anti-CD73 antibody molecule comprises a heavy chain variable domain, a light chain variable domain, or both, of an anti-CD73 antibody disclosed in Flocke et al., Eur J Cell Biol. 1992 June; 58(1):62-70.

[0920] In one embodiment, the anti-CD73 antibody molecule is an anti-CD73 antibody disclosed in Stagg et al., PNAS. 2010 January 107(4): 1547-1552. In some embodiments, the anti-CD73 antibody molecule is TY/23 or TY11.8, as disclosed in Stagg et al. In one embodiment, the anti-CD73 antibody molecule comprises a heavy chain variable domain, a light chain variable domain, or both, of an anti-CD73 antibody disclosed in Stagg et al.

[0921] In some embodiments, the CD19 binding molecule is administered in combination with an interleukine-17 (IL-17) inhibitor.

[0922] In some embodiments, the IL-17 inhibitor is secukinumab (CAS Registry Numbers: 875356-43-7 (heavy chain) and 875356-44-8 (light chain)). Secukinumab is also known as AIN457 and COSENTYX®. Secukinumab is a recombinant human monoclonal IgG1/κ antibody that binds specifically to IL-17A. It is expressed in a recombinant Chinese Hamster Ovary (CHO) cell line. Secukinumab is described, e.g., in WO 2006/013107, U.S. Pat. Nos. 7,807,155, 8,119,131, 8,617,552, and EP 1776142.

[0923] In some embodiments, the IL-17 inhibitor is CJM112. CJM112 is also known as XAB4. CJM112 is a fully human monoclonal antibody (e.g., of the IgG1/κ isotype) that targets IL-17A. CJM112 is disclosed, e.g., in WO 2014/122613.

[0924] CJM112 can bind to human, cynomolgus, mouse and rat IL-17A and neutralize the bioactivity of these cytokines in vitro and in vivo. IL-17A, a member of the IL-17 family, is a major proinflammatory cytokine that has been indicated to play important roles in many immune mediated conditions, such as psoriasis and cancers (Witowski et al. (2004) Cell Mol. Life Sci. p. 567-79; Miossec and Kolls (2012) Nat. Rev. Drug Discov. p. 763-76).

[0925] In some embodiments, the IL-17 inhibitor is ixekizumab (CAS Registry Number 1143503-69-8). Ixekizumab is also known as LY2439821. Ixekizumab is a humanized IgG4 monoclonal antibody that targets IL-17A. Ixekizumab is described, e.g., in WO 2007/070750, U.S. Pat. Nos. 7,838,638, and 8,110,191.

[0926] In some embodiments, the IL-17 inhibitor is brodalumab (CAS Registry Number 1174395-19-7). Brodalumab is also known as AMG 827 or AM-14. Brodalumab binds to the interleukin-17 receptorA (IL-17RA) and prevents IL-17 from activating the receptor. Brodalumab is disclosed, e.g., in WO 2008/054603, U.S. Pat. Nos. 7,767,206, 7,786,284, 7,833,527, 7,939,070, 8,435,518, 8,545,842, 8,790,648, and 9,073,999.

[0927] In some embodiments, the CD19 binding molecule is administered in combination with an interleukine-1 beta (IL-1s) inhibitor.

[0928] In some embodiments, the IL-1s inhibitor is canakinumab. Canakinumab is also known as ACZ885 or ILARIS®. Canakinumab is a human monoclonal IgG1/κ antibody that neutralizes the bioactivity of human IL-1s. Canakinumab is disclosed, e.g., in WO 2002/16436, U.S. Pat. No. 7,446,175, and EP 1313769.

[0929] In some embodiments, the CD19 binding molecule is administered in combination with a CD32B inhibitor. In some embodiments, the CD32B inhibitor is an anti-CD32B antibody molecule. Exemplary anti-CD32B antibody molecules are disclosed in U.S. Pat. Nos. 8,187,593, 8,778,339, 8,802,089, US20060073142, US20170198040, and US20130251706.

[0930] In some embodiments, the CD19 binding molecule is administered in combination with one of the compounds listed in Table 18.

TABLE 18

| Compound | Generic | | Patents / Patent |
|---|---|---|---|
| Desig- | Name | | Application |
| nation | Tradename | Compound Structure | Publications |
| A1 | Sotrastaurin | [chemical structure] | EP 1682103 US 2007/142401 WO 2005/039549 |
| A2 | Nilotinib HCl monohydrate TASIGNA ® | [chemical structure] | WO 2004/005281 U.S. Pat. No. 7,169,791 |
| | | HCl • H₂O | |
| A3 | | [chemical structure] | WO 2009/141386 US 2010/0105667 |
| A4 | | [chemical structure] | WO 2010/029082 |
| A5 | | [chemical structure] | WO 2011/076786 |
| A6 | Deferasirox EXJADE ® | [chemical structure] | WO 1997/049395 |
| A7 | Letrozole FEMARA ® | [chemical structure] | U.S. Pat. No. 4,978,672 |
| A8 | | [chemical structure] | WO 2013/124826 US 2013/0225574 |
| A9 | | [chemical structure] | WO 2013/111105 |
| A10 | BLZ945 | [chemical structure] | WO 2007/121484 |
| A11 | Imatinib mesylate GLEEVEC ® | [chemical structure] | WO 1999/003854 |
| | | Mesylate | |
| A12 | Capmatinib | [chemical structure] | EP 2099447 U.S. Pat. No. 7,767,675 U.S. Pat. No. 8,420,645 |
| | | Dihydrochloric salt | |
| A13 | Ruxolitinib Phosphate JAKAFI ® | [chemical structure] | WO 2007/070514 EP 2474545 U.S. Pat. No. 7,598,257 WO 2014/018632 |
| | | H₃PO₄ | |
| A14 | Panobinostat | [chemical structure] | WO 2014/072493 WO 2002/022577 EP 1870399 |
| A15 | Osilodrostat | [chemical structure] | WO 2007/024945 |
| A16 | | [chemical structure] | WO 2008/016893 EP 2051990 U.S. Pat. No. 8,546,336 |
| A17 | ceritinib ZYKADIA ™ | [chemical structure] | WO 2008/073687 U.S. Pat. No. 8,039,479 |
| A18 | Ribociclib KISQALI ® | [chemical structure] | U.S. Pat. No. 8,415,355 U.S. Pat. No. 8,685,980 |
| A19 | | [chemical structure] | WO 2010/007120 |
| A20 | | Human monoclonal antibody to PRLR | U.S. Pat. No. 7,867,493 |
| A21 | | [chemical structure] | WO 2010/026124 EP 2344474 US 2010/0056576 WO2008/106692 |
| A22 | WNT974 | [chemical structure] | WO 2010/101849 |
| A23 | | [chemical structure] | WO 2011/101409 |
| A24 | | Human monoclonal antibody to HER3, , e.g., | WO 2012/022814 |
| | | LJM716 | EP 2606070 |
| | | | U.S. Pat. No. 8,735,551 |
| A25 | | Antibody Drug Conjugate (ADC) | WO 2014/160160, |
| | | | e.g., Ab: 12425 |
| | | | (see Table 1, |
| | | | paragraph [00191]) |
| | | | Linker: SMCC (see |
| | | | paragraph [00117] |
| | | | Payload: DM1 (see |
| | | | paragraph [00111] |
| | | | See also Claim 29 |
| A26 | | Monoclonal antibody or Fab to M-CSF, e.g., | WO 2004/045532 |
| | | MCS110 | |
| A27 | Midostaurin | [chemical structure] | WO 2003/037347 EP 1441737 US 2012/252785 |
| A28 | Everolimus AFINITOR ® | [chemical structure] | WO 2014/085318 |
| A29 | | [chemical structure] | WO 2007/030377 U.S. Pat. No. 7,482,367 |
| A30 | Pasireotide diaspartate SIGNIFOR ® | [chemical structure] | U.S. Pat. No. 7,473,761 |
| A31 | | [chemical structure] | WO 2013/184757 |
| A32 | | [chemical structure] | WO 2006/122806 |
| A33 | | [chemical structure] | WO 2008/073687 U.S. Pat. No. 8,372,858 |
| A34 | | [chemical structure] | WO 2010/002655 U.S. Pat. No. 8,519,129 |
| A35 | | [chemical structure] | WO 2010/002655 U.S. Pat. No. 8,519,129 |
| A36 | | [chemical structure] | WO 2010/002655 |
| A37 | Valspodar AMDRAY ™ | [chemical structure] | EP 296122 |
| A38 | Vatalanib succinate | [chemical structure] | WO 98/35958 |
| | | succinate | |
| A39 | | IDH inhibitor, e.g., IDH305 | WO2014/141104 |
| A40 | Asciminib | BCR-ABL inhibitor [chemical structure] | WO2013/171639 WO2013/171640 WO2013/171641 WO2013/171642 |
| A41 | | CRAF inhibitor | WO2014/151616 |
| A42 | | ERK1/2 ATP competitive inhibitor | WO2015/066188 |
| A43 | | [chemical structure] | WO2011/023773 |
| A44 | | [chemical structure] | WO2012/149413 |
| A45 | SHP099 | [chemical structure] | WO2015/107493 |
| A46 | | SHP2 inhibitor of Formula I | WO2015/107495 |
| A47 | | [chemical structure] | WO2015/022662 |
| A48 | | [chemical structure] | WO2014/141104 |
| A49 | | [chemical structure] | WO2010/015613 WO2013030803 U.S. Pat. No. 7,989,497, |
| | | or a choline salt thereof | |
| A50 | | A2A receptor antagonist of Formula (I) | WO 2017/025918 |
| | | | WO2011/121418 |
| | | | U.S. Pat. No. 8,796,284 |
| A51 | | [chemical structure] | WO2014/130310 |
| A52 | trametinib | [chemical structure] | WO2005/121142 U.S. Pat. No. 7,378,423 |
| A53 | dabrafenib | [chemical structure] | WO 2009/137391 U.S. Pat. No. 7,994,185 |
| A54 | octreotide | [chemical structure] | U.S. Pat. No. 4,395,403 EP 0 029 579 |
| A55 | | [chemical structure] | WO 2016/103155 U.S. Pat. No. 9,580,437 EP 3237418 |
| A56 | | [chemical structure] | U.S. Pat. No. 9,512,084 WO/2015/079417 |
| A57 | | [chemical structure] | WO2011/049677 |

[0931] In some embodiments, a CD19 binding molecule is administered in combination with one or more of NIZ985, a GITR agonist such as GWN323, PTK787, MBG453, mAb12425, CLR457, BGT226, BYL719, AMN107, ABL001, IDH305/LQS305, UJM716, MCS110, WNT974/LGK974, BLZ945, NIR178, QBM076, MBG453, CGS-20267, LHS534, LKG960, LDM099/SHP099, TNO155, LCL161, MAP855/LQN716, RAD001, LEJ511, LDK378, LOU064, LSZ102, LEQ506, RAF265/CHIR265, canakinumab, gevokizumab, Anakinra, Rilonacept, CGS-20267, PSC833, GGP-57148B, CGM097, HDM201, LBH589, PKC412, LHC165, MAK683, INC280, INC424, LJE704, LAG525, and NIS793.

[0932] In some embodiments, the CD19 binding molecule is administered in combination with a standard treatment.

[0933] Standard treatment for multiple myeloma and associated diseases includes chemotherapy, stem cell transplant (autologous or allogeneic), radiation therapy, and other drug therapies. Frequently used anti-myeloma drugs include alkylating agents (e.g., bendamustine, cyclophosphamide and melphalan), proteasome inhibitors (e.g., bortezomib), corticosteroids (e.g., dexamethasone and prednisone), and immunomodulators (e.g., thalidomide and lenalidomide or Revlimid®), or any combination thereof. Biphosphonate drugs are also frequently administered in combination with the standard anti-MM treatments to prevent bone loss. Patients older than 65-70 years of age are unlikely candidates for stem cell transplant. In some cases, double-autologous stem cell transplants are options for patients less than 60 years of age with suboptimal response to the first transplant. The compositions and methods of the present disclosure can be administered in combination with any of the currently prescribed treatments for multiple myeloma.

[0934] Hodgkin's lymphoma is commonly treated with radiation therapy, chemotherapy, or hematopoietic stem cell transplantation. The most common therapy for non-Hodgkin's lymphoma is R-CHOP, which consists of four different chemotherapies (cyclophosphamide, doxorubicin, vincristine, and prenisolone) and rituximab (Rituxan®). Other therapies commonly used to treat NHL include other chemotherapeutic agents, radiation therapy, stem cell transplantation (autologous or allogeneic bone marrow transplantation), or biological therapy, such as immunotherapy. Other examples of biological therapeutic agents include, but are not limited to, rituximab (Rituxan®), tositumomab (Bexxar®), epratuzumab (LymphoCide®), and alemtuzumab (MabCampath®). The compositions and methods of the present disclosure can be administered in combination with any of the currently prescribed treatments for Hodgkin's lymphoma or non-Hodgkin's lymphoma.

[0935] Standard treatment for WM consists of chemotherapy, specifically with rituximab (Rituxan®). Other chemotherapeutic drugs can be used in combination, such as chlorambucil (Leukeran®), cyclophosphamide (Neosar®), fludarabine (Fludara®), cladribine (Leustatin®), vincristine, and/or thalidomide. Corticosteriods, such as prednisone, can also be administered in combination with the chemotherapy. Plasmapheresis, or plasma exchange, is commonly used throughout treatment of the patient to alleviate some symptoms by removing the paraprotein from the blood. In some cases, stem cell transplantation is an option for some patients.

[0936] The CD19 binding molecules of the disclosure can be administered in combination with an agent which reduces or ameliorates a side effect associated with the administration of such binding molecules, including MBMs that bind to both CD19 and CD3. Side effects associated with the administration of MBMs that bind to both CD19 and CD3 can include, but are not limited to, cytokine release syndrome (“CRS”) and hemophagocytic lymphohistiocytosis (HLH), also termed Macrophage Activation Syndrome (MAS). Symptoms of CRS can include high fevers, nausea, transient hypotension, hypoxia, and the like. CRS can include clinical constitutional signs and symptoms such as fever, fatigue, anorexia, myalgias, arthalgias, nausea, vomiting, and headache. CRS can include clinical skin signs and symptoms such as rash. CRS can include clinical gastrointestinal signs and symptoms such as nausea, vomiting and diarrhea. CRS can include clinical respiratory signs and symptoms such as tachypnea and hypoxemia. CRS can include clinical cardiovascular signs and symptoms such as tachycardia, widened pulse pressure, hypotension, increased cardiac output (early) and potentially diminished cardiac output (late). CRS can include clinical coagulation signs and symptoms such as elevated d-dimer, hypofibrinogenemia with or without bleeding. CRS can include clinical renal signs and symptoms such as azotemia. CRS can include clinical hepatic signs and symptoms such as transaminitis and hyperbilirubinemia. CRS can include clinical neurologic signs and symptoms such as headache, mental status changes, confusion, delirium, word finding difficulty or frank aphasia, hallucinations, tremor, dymetria, altered gait, and seizures.

[0937] Accordingly, the methods described herein can comprise administering a MBM that binds to both CD19 and CD3 to a subject and further administering one or more agents to manage elevated levels of a soluble factor resulting from treatment with the MBM. In one embodiment, the soluble factor elevated in the subject is one or more of IFN-γ, TNFα, IL-2 and IL-6. In an embodiment, the factor elevated in the subject is one or more of IL-1, GM-CSF, IL-10, IL-8, IL-5 and fraktalkine. Therefore, an agent administered to treat this side effect can be an agent that neutralizes one or more of these soluble factors. In one embodiment, the agent that neutralizes one or more of these soluble forms is an antibody or antigen binding fragment thereof. Examples of such agents include, but are not limited to a steroid (e.g., corticosteroid), an inhibitor of TNFα, and inhibitor of IL-1R, and an inhibitor of IL-6. An example of a TNFα inhibitor is an anti-TNFα antibody molecule such as, infliximab, adalimumab, certolizumab pegol, and golimumab. Another example of a TNFα inhibitor is a fusion protein such as entanercept. Small molecule inhibitor of TNFα include, but are not limited to, xanthine derivatives (e.g. pentoxifylline) and bupropion. An example of an IL-6 inhibitor is an anti-IL-6 antibody molecule such as tocilizumab (toc), sarilumab, elsilimomab, CNTO 328, ALD518/BMS-945429, CNTO 136, CPSI-2364, CDP6038, VX30, ARGX-109, FE301, and FM101. In one embodiment, the anti-IL-6 antibody molecule is tocilizumab. An example of an IL-1R based inhibitor is anakinra.

[0938] In some embodiment, the subject is administered a corticosteroid, such as, e.g., methylprednisolone, hydrocortisone, among others. In some embodiments, the subject is administered a corticosteroid, e.g., methylprednisolone, hydrocortisone, in combination with Benadryl and Tylenol prior to the administration of a CD19 binding molecule, e.g., a MBM that binds CD19 and CD3.

[0939] In some embodiments, the subject is administered a vasopressor, such as, e.g., norepinephrine, dopamine, phenylephrine, epinephrine, vasopressin, or any combination thereof.

[0940] In an embodiment, the subject can be administered an antipyretic agent. In an embodiment, the subject can be administered an analgesic agent.

### 8. EXAMPLES

[0941] The examples below relate, in part, to the identification of novel CD19 binders, NEG218 and NEG258, that bind to human CD19 and are cross-reactive with cynomolgus (cyno) CD19, their incorporation into bispecific (BSP) and trispecific (TSP) binding molecules that engage CD3 and, in the case of the TSPs, CD2, as well as extensive characterization of the anti-tumor and immunostimulatory activities of the BSPs and TSPs.

[0942] In functional assays, the TSPs, particularly CD3hi TSP1, demonstrate enhanced tumor cell killing and T cell activation & proliferation as compared to the corresponding BSPs, While both CD3hi TSP1 and CD3med TSP1 demonstrate effective anti-tumor responses on established tumors in tumor-bearing mice, T-cell activation by CD3hi TSP1 is particularly effective at enriching T cells with a younger and more functional phenotype. Additionally, CD3hi TSP1 is particularly effective in activating CD28neg CD8-T cells, the exhausted/terminally differentiated cytotoxic T cells. Further, CD3hi TSP1-treated T cells better retain ability to kill target cells upon repeated challenges.

[0943] Altogether, this evidence presented herein indicates that the use of CD2 co-stimulation, particularly via a CD58 moiety, results in a CD19 binding molecule that can engage T cells in a manner that can achieve optimal T cell activation and prevent exhaustion, potentially resulting in a more effective and durable anti-tumor response.

[0944] The TSPs, particularly CD3hi TSP1, are optimized for a combination of factors, ranging from a novel CD19 binding domain that cross-reacts with cyno CD19, the inclusion of a CD2 binding moiety, the nature and affinity of the T-cell binding moieties (CD58 vs. an anti-CD2 antibody, the relatively “high” or “medium” affinity of the CD3 binding moiety), and the configuration of the binding moieties in the molecules (e.g., CD19 at the N-terminus), all of which individually confer advantageous properties that are expected to result in superior CD19 therapeutics.

### 8.1. Example 1: Production of Anti-CD3-Anti-CD19 IgG1 Bispecific and Trispecific Binding Molecules in Knob-into-Holes Format

### 8.1.1. Example 1A: Initial BBM and TBM Constructs

[0945] BBMs having a CD3 ABM and a CD19 ABM (shown schematically in FIG. 3A), and TBMs having a CD3 ABM, a CD19 ABM, and a CD2 ABM (shown schematically in FIG. 3B) were produced in a knob-into-hole (KIH) format. Each BBM and TBM of this Example comprises a first half antibody (shown schematically as the left half of each construct shown in FIGS. 3A-3B) and a second half antibody (shown schematically as the right half of each construct shown in FIGS. 3A-3B).

[0946] 8.1.1.1. Materials and Methods

[0947] 8.1.1.1.1. Plasmids Encoding BBMs and TBMs

[0948] Plasmids for all constructs were synthesized and codon optimized for expression in mammalian cells.

[0949] For each bispecific construct, three plasmids were synthesized. A first plasmid encoding an anti-CD19 heavy chain was synthesized as a fusion comprising (in the N-terminal to C-terminal direction) (i) an anti-CD19 VH domain and (ii) a constant hIgG1 domain containing T366S, L368A, and Y407V mutations for a hole to facilitate heterodimerization as well as silencing mutations. A second plasmid encoding a light chain was synthesized as a fusion comprising (in the N-terminal to C-terminal direction) (i) an anti-CD19 VL domain and (ii) a constant human kappa sequence. The proteins encoded by the first and second plasmids form the first half antibody. A third plasmid encoding the second half antibody was synthesized as a fusion comprising (in the N-terminal to C-terminal direction) (i) an anti-CD3 single chain variable fragment (having the VH and VL domains of an anti-CD3 antibody designated as CD3hi (as defined in the following paragraph)), (ii) a linker, and (iii) a constant hIgG1 domain containing a T366W mutation for a knob to facilitate heterodimerization as well as silencing mutations.

[0950] For each trispecific construct, three plasmids were synthesized. A first plasmid encoding an anti-CD19 heavy chain was synthesized as a fusion comprising (in the N-terminal to C-terminal direction) (i) an anti-CD19 VH domain fused to a constant hIgG1 CH1 domain, (ii) a linker, (iii) an anti-CD3 scFv with VH and VL domains of an anti-CD3 antibody having high, medium, or low affinity to CD3 (in relative terms), and referred to herein as CD3hi, CD3med or CD3lo (from anti-CD3 antibodies having an affinity to CD3 of 16 nM, 30 nM, or 48 nm, respectively, as measured by Biacore), (iv) a second linker, and (v) an hIgG1 Fc domain containing T366S, L368A, and Y407V mutations for a hole to facilitate heterodimezation as well as silencing mutations. It should be understood that with respect to the mentioned Biacore affinity values and relative terms in the construct names, these are used merely for identification purposes and are not intended to represent absolute affinity values. A second plasmid encoding a light chain was synthesized as a fusion comprising (in the N-terminal to C-terminal direction) (i) an anti-CD9 VL domain and (ii) a constant human kappa sequence. The proteins encoded by the first and second plasmids form the first half antibody. A third plasmid encoding the second half antibody was synthesized as a fusion comprising (in the N-terminal to C-terminal direction) (i) the IgV domain of CD58 (CD58-6) and (ii) a constant hIgG1 domain containing a T366W mutation for a knob to facilitate heterodimerization as well as silencing mutations.

[0951] Control constructs corresponding to the CD3hi TSP1 (which has a NEG258-based CD19 binding arm) and CD3hi TSP2 (which has a NEG218-based CD19 binding arm) trispecific constructs were produced in which the CD2 ABM was replaced with a Vhh against hen egg lysozyme (such control constructs having the names CD3hi TSP1L and CD3hi TSP2L, respectively).

[0952] Amino acid sequences for components of the constructs are shown in Table 9A-1 (without Fc sequences) and Table 19A-2 (with Fc sequences).

TABLE 19A-1
Amino acid sequences

| | | | SEQ |
|---|---|---|---|
| Construct | Chain | | ID |
| Name | Description | Amino Acid Sequence | NO: |
| CD3hi | First Half | QVQLVQSGAEVKKPGASVKVSCKASGYTFTTYWIQWVRQAPG | 758 |
| TSP1 | Antibody | QRLEWMGAVYPGDADTRYTQKFQGRVTLTADRSASTAYMELS | |
| | Heavy Chain | SLRSEDTAVYYCGRDAGLEYYALDYWGQGTLVTVSSASTKGP | |
| | (Fc sequence | SVFPLAPSSKSTSGGTAALGCLVKDYFPEPVTVSWNSGALTSG | |
| | not shown) | VHTFPAVLQSSGLYSLSSVVTVPSSSLGTQTYICNVNHKPSNTK | |
| | | VDKRVEPKSCGGGGSGGGGSEVQLVESGGGLVQPGGSLKLS | |
| | | CAASGFTFNTYAMNWVRQASGKGLEWVGRIRSKYNNYATYYA | |
| | | DSVKDRFTISRDDSKSTLYLQMNSLKTEDTAVYYCVRHGNFGN | |
| | | SYVSWFAYWGQGTLVTVSSGGGGSGGGGSGGGGSGGGGS | |
| | | QAVVTQEPSLTVSPGGTVTLTCRSSTGAVTTSNYANWVQQKP | |
| | | GQAPRGLIGGTNKRAPWTPARFSGSLLGDKAALTLSGAQPED | |
| | | EAEYFCALWYSNLWVFGGGTKLTVLGGGGS | |
| | First Half | EIVMTQSPATLSVSPGERATLSCRASQDVGTAVAWYQQKPGQ | 759 |
| | Antibody | APRLLIYWASTRHTGIPARFSGSGSGTEFTLTISSLQSEDFAVYF | |
| | Light Chain | CQQYANFPLYTFGQGTKLEIKRTVAAPSVFIFPPSDEQLKSGTA | |
| | | SVVCLLNNFYPREAKVQWKVDNALQSGNSQESVTEQDSKQST | |
| | | YSLSSTLTLSKADYEKHKVYACEVTHQGLSSPVTKSFNRGEC | |
| | Second Half | SQQIYGVVYGNVTFHVPSNVPLKEVLWKKQKDKVAELENSEFR | 760 |
| | Antibody | AFSSFKNRVYLDTVSGSLTIYNLTSSDEDEYEMESPNITDTMKF | |
| | (Fc sequence | FLYVLESGGGGS | |
| | not shown) | | |
| CD3med | First Half | QVQLVQSGAEVKKPGASVKVSCKASGYTFTTYWIQWVRQAPG | 761 |
| TSP1 | Antibody | QRLEWMGAVYPGDADTRYTQKFQGRVTLTADRSASTAYMELS | |
| | Heavy Chain | SLRSEDTAVYYCGRDAGLEYYALDYWGQGTLVTVSSASTKGP | |
| | (Fc sequence | SVFPLAPSSKSTSGGTAALGCLVKDYFPEPVTVSWNSGALTSG | |
| | not shown) | VHTFPAVLQSSGLYSLSSVVTVPSSSLGTQTYICNVNHKPSNTK | |
| | | VDKRVEPKSCGGGGSGGGGSEVQLVESGGGLVQPGGSLKLS | |
| | | CAASGFTFNTYAMNWVRQASGKGLEWVGRIRSKYNNYATYYA | |
| | | DSVKDRFTISRDDSKNTAYLQMNSLKTEDTAVYYCVRHGNFGN | |
| | | SYVSWFAHWGQGTLVTVSSGGGGSGGGGSGGGGSGGGGS | |
| | | QAVVTQEPSLTVSPGGTVTLTCGSSTGAVTSSNYANWVQQKP | |
| | | GQAPRGLIGGTNKRAPWTPARFSGSLLGGKAALTLSGAQPED | |
| | | EAEYYCALWYSNLWVFGGGTKLTVLGGGGS | |
| | First Half | EIVMTQSPATLSVSPGERATLSCRASQDVGTAVAWYQQKPGQ | 759 |
| | Antibody | APRLLIYWASTRHTGIPARFSGSGSGTEFTLTISSLQSEDFAVYF | |
| | Light Chain | CQQYANFPLYTFGQGTKLEIKRTVAAPSVFIFPPSDEQLKSGTA | |
| | | SVVCLLNNFYPREAKVQWKVDNALQSGNSQESVTEQDSKDST | |
| | | YSLSSTLTLSKADYEKHKVYACEVTHQGLSSPVTKSFNRGEC | |
| | Second Half | SQQIYGVVYGNVTFHVPSNVPLKEVLWKKQKDKVAELENSEFR | 760 |
| | Antibody | AFSSFKNRVYLDTVSGSLTIYNLTSSDEDEYEMESPNITDTMKF | |
| | (Fc sequence | FLYVLESGGGGS | |
| | not shown) | | |
| CD3lo | First Half | QVQLVQSGAEVKKPGASVKVSCKASGYTFTTYWIQWVRQAPG | 762 |
| TSP1 | Antibody | QRLEWMGAVYPGDADTRYTQKFQGRVTLTADRSASTAYMELS | |
| | Heavy Chain | SLRSEDTAVYYCGRDAGLEYYALDYWGQGTLVTVSSASTKGP | |
| | (Fc sequence | SVFPLAPSSKSTSGGTAALGCLVKDYFPEPVTVSWNSGALTSG | |
| | not shown) | VHTFPAVLQSSGLYSLSSVVTVPSSSLGTQTYICNVNHKPSNTK | |
| | | VDKRVEPKSCGGGGSGGGGSEVQLVESGGGLVQPGGSLKLS | |
| | | CAASGFTFNTYAMNWVRQASGKGLEWVGRIRSKYNNYATYYA | |
| | | DSVKDRFTISRDDSKSTAYLQMNSLKTEDTAVYYCVRHGNFGN | |
| | | SYVSWFAYWGQGTLVTVSSGGGGSGGGGSGGGGSGGGGS | |
| | | QAVVTQEPSLTVSPGGTVTLTCRSSTGAVTTSNYANWVQQKP | |
| | | GQAPRGLIGGTNKRAPWTPARFSGSLLGDKAALTLSGAQPED | |
| | | EAEYFCALWYSNLWVFGGGTKLTVLGGGGS | |
| | First Half | EIVMTQSPATLSVSPGERATLSCRASQDVGTAVAWYQQKPGQ | 759 |
| | Antibody | APRLLIYWASTRHTGIPARFSGSGSGTEFTLTISSLQSEDFAVYF | |
| | Light Chain | CQQYANFPLYTFGQGTKLEIKRTVAAPSVFIFPPSDEQLKSGTA | |
| | | SVVCLLNNFYPREAKVQWKVDNALQSGNSQESVTEQDSKDST | |
| | | YSLSSTLTLSKADYEKHKVYACEVTHQGLSSPVTKSFNRGEC | |
| | Second Half | SQQIYGVVYGNVTFHVPSNVPLKEVLWKKQKDKVAELENSEFR | 760 |
| | Antibody | AFSSFKNRVYLDTVSGSLTIYNLTSSDEDEYEMESPNITDTMKF | |
| | (Fc sequence | FLYVLESGGGGS | |
| | not shown) | | |
| CD3hi | First Half | EVQLVQSGAEVKKPGESLKISCKASGYSFTNYWMNWWVRQMP | 763 |
| TSP2 | Antibody | GKGLEWMGMIHPSDSEIRLNQKFQGQVTLSVDKSIGTAYMQW | |
| | Heavy Chain | SSLKASDTAMYYCSRWYYLSSPMDYWGQGTTVTVSSASTKGP | |
| | (Fc sequence | SVFPLAPSSKSTSGGTAALGQLVKDYFPEPVTVSWNSGALTSG | |
| | not shown) | VHTFPAVLQSSGLYSLSSVVTVPSSSLGTQTYICNVNHKPSNTK | |
| | | VDKRVEPKSCGGGGSGGGGSEVQLVESGGGLVQPGGSLKLS | |
| | | CAASGFTFNTYAMNWVRQASGKGLEWVGRIRSKYNNYATYYA | |
| | | DSVKDRFTISRDDSKSTLYLQMNSLKTEDTAVYYCVRHGNFGN | |
| | | SYVSWFAYWGQGTLVTVSSGGGGSGGGGSGGGGSGGGGS | |
| | | QAVVTQEPSLTVSPGGTVTLTCRSSTGAVTTSNYANWVQQKP | |
| | | GQAPRGLIGGTNKRAPWTPARFSGSLLGDKAALTLSGAQPED | |
| | | EAEYFCALWYSNLWVFGGGTKLTVLGGGGS | |
| | First Half | EIVMTQSPATLSVSPGERATLSCRASQDVGTAVAWYQQKPGQ | 764 |
| | Antibody | APRLLIYWASTRHTGIPARFSGSGSGTEFTLTISSLQSEDFAVYF | |
| | Light Chain | CQQYSSYPYTFGQGTKLEIKRTVAAPSVFIFPPSDEQLKSGTAS | |
| | | VVCLLNNFYPREAKVQWKVDNALQSGNSQESVTEQDSKDSTY | |
| | | SLSSTLTLSKADYEKHKVYACEVTHQGLSSPVTKSFNRGEC | |
| | Second Half | SQQIYGVVYGNVTFHVPSNVPLKEVLWKKQKDKVAELENSEFR | 760 |
| | Antibody | AFSSFKNRVYLDTVSGSLTIYNLTSSDEDEYEMESPNITDTMKF | |
| | (Fc sequence | FLYVLESGGGGS | |
| | not shown) | | |
| CD3hi | First Half | QVQLVQSGAEVKKPGASVKVSCKASGYTFTTYWIQWVRQAPG | 758 |
| TSP1L | Antibody | QRLEWMGAVYPGDADTRYTQKFQGRVTLTADRSASTAYMELS | |
| | Heavy Chain | SLRSEDTAVYYCGRDAGLEYYALDYWGQGTLVTVSSASTKGP | |
| | (Fc sequence | SVFPLAPSSKSTSGGTAALGQLVKDYFPEPVTVSWNSGALTSG | |
| | not shown) | VHTFPAVLQSSGLYSLSSVVTVPSSSLGTQTYICNVNHKPSNTK | |
| | | VDKRVEPKSCGGGGSGGGGSEVQLVESGGGLVQPGGSLKLS | |
| | | CAASGFTFNTYAMNWVRQASGKGLEWVGRIRSKYNNYATYYA | |
| | | DSVKDRFTISRDDSKSTLYLQMNSLKTEDTAVYYCVRHGNFGN | |
| | | SYVSWFAYWGQGTLVTVSSGGGGSGGGGSGGGGSGGGGS | |
| | | QAVVTQEPSLTVSPGGTVTLTCRSSTGAVTTSNYANWVQQKP | |
| | | GQAPRGLIGGTNKRAPWTPARFSGSLLGDKAALTLSGAQPED | |
| | | EAEYFQALWYSNLWVFGGGTKLTVLGGGGS | |
| | First Half | EIVMTQSPATLSVSPGERATLSCRASQDVGTAVAWYQQKPGQ | 759 |
| | Antibody | APRLLIYWASTRHTGIPARFSGSGSGTEFTLTISSLQSEDFAVYF | |
| | Light Chain | CQQYANFPLYTFGQGTKLEIKRTVAAPSVFIFPPSDEQLKSGTA | |
| | | SVVCLLNNFYPREAKVQWKVDNALQSGNSQESVTEQDSKDST | |
| | | YSLSSTLTLSKADYEKHKVYACEVTHQGLSSPVTKSFNRGEC | |
| | Second Half | DVQLQASGGGSVQAGGSLRLSCAASGYTIGPYCMGWFRQAP | 765 |
| | Antibody | GKEREGVAAINMGGGITYYADSVKGRFTISQDNAKNTVYLLMN | |
| | (Fc sequence | SLEPEDTAIYYCAADSTIYASYYECGHGLSTGGYGYDSWGQGT | |
| | not shown) | QVTVSSGGGGS | |
| CD3hi | First Half | EVQLVQSGAEVKKPGESLKISCKASGYSFTNYWMNWWVRQMP | 763 |
| TSP2L | Antibody | GKGLEWMGMIHPSDSEIRLNQKFQGQVTLSVDKSIGTAYMQW | |
| | Heavy Chain | SSLKASDTAMYYCSRWYYLSSPMDYWGQGTTVTVSSASTKGP | |
| | (Fc sequence | SVFPLAPSSKSTSGGTAALGQLVKDYFPEPVTVSWNSGALTSG | |
| | not shown) | VHTFPAVLQSSGLYSLSSVVTVPSSSLGTQTYICNVNHKPSNTK | |
| | | VDKRVEPKSCGGGGSGGGGSEVQLVESGGGLVQPGGSLKLS | |
| | | CAASGFTFNTYAMNWVRQASGKGLEWVGRIRSKYNNYATYYA | |
| | | DSVKDRFTISRDDSKSTLYLQMNSLKTEDTAVYYCVRHGNFGN | |
| | | SYVSWFAYWGQGTLVTVSSGGGGSGGGGSGGGGSGGGGS | |
| | | QAVVTQEPSLTVSPGGTVTLTCRSSTGAVTTSNYANWVQQKP | |
| | | GQAPRGLIGGTNKRAPWTPARFSGSLLGDKAALTLSGÅQPED | |
| | | EAEYFCALWYSNLWVFGGGTKLTVLGGGGS | |
| | First Half | EIVMTQSPATLSVSPGERATLSCRASQDVGTAVAWYQQKPGQ | 764 |
| | Antibody | APRLLIYWASTRHTGIPARFSGSGSGTEFTLTISSLQSEDFAVYF | |
| | Light Chain | CQQYSSYPYTFGQGTKLEIKRTVAAPSVFIFPPSDEQLKSGTAS | |
| | | VVCLLNNFYPREAKVQWKVDNALQSGNSQESVTEQDSKDSTY | |
| | | SLSSTLTLSKADYEKHKVYACEVTHQGLSSPVTKSFNRGEC | |
| | Second Half | DVQLQASGGGSVQAGGSLRLSCAASGYTIGPYCMGWFRQAP | 765 |
| | Antibody | GKEREGVAAINMGGGITYYADSVKGRFTISQDNAKNTVYLLMN | |
| | (Fc sequence | SLEPEDTAIYYCAADSTIYASYYECGHGLSTGGYGYDSWGQGT | |
| | not shown) | QVTVSGS | |
| CD3hi | First Half | QVQLVQSGAEVKKPGASVKVSCKASGYTFTTYWIQWVRQAPG | 766 |
| BSP1-2 | Antibody | QRLEWMGAVYPGDADTRYTQKFQGRVTLTADRSASTAYMELS | |
| arm | Heavy Chain | SLRSEDTAVYYCGRDAGLEYYALDYWGQGTLVTVSSASTKGP | |
| | (Fc sequence | SVFPLAPSSKSTSGGTAALGCLVKDYFPEPVTVSWNSGALTSG | |
| | not shown) | VHTFPAVLQSSGLYSLSSVVTVPSSSLGTQTYICNVNHKPSNTK | |
| | | VDKRVEPKSC | |
| | First Half | EIVMTQSPATLSVSPGERATLSCRASQDVGTAVAWYQQKPGQ | 759 |
| | Antibody | APRLLIYWASTRHTGIPARFSGSGSGTEFTLTISSLQSEDFAVYF | |
| | Light Chain | CQQYANFPLYTFGQGTKLEIKRTVAAPSVFIFPPSDEQLKSGTA | |
| | | SVVCLLNNFYPREAKVQWKVDNALQSGNSQESVTEQDSKDST | |
| | | YSLSSTLTLSKADYEKHKVYACEVTHQGLSSPVTKSFNRGEC | |
| | Second Half | EVQLVESGGGLVQPGGSLKLSCAASGFTFNTYAMNWVRQAS | 767 |
| | Antibody | GKGLEWWVGRIRSKYNNYATYYADSVKDRFTISRDDSKSTLYLQ | |
| | (Fc sequence | MNSLKTEDTAVYYCVRHGNFGNSYVSWFAYWGQGTLVTVSS | |
| | not shown) | GGGGSGGGGSGGGGSGGGGSQAVVTQEPSLTVSPGGTVTLT | |
| | | CRSSTGAVTTSNYANWVQQKPGQAPRGLIGGTNKRAPWTPA | |
| | | RFSGSLLGDKAALTLSGAQPEDEAEYFCALWYSNLWVFGGGT | |
| | | KLTVLGGGGS | |
| CD3hi | First Half | EVQLVQSGAEVKKPGESLKISCKASGYSFTNYWMNVWRQMP | 768 |
| BSP2-2 | Antibody | GKGLEWMGMIHPSDSEIRLNQKFQGQVTLSVDKSIGTAYMQW | |
| | Heavy Chain | SSLKASDTAMYYCSRWYYLSSPMDYWGQGTTVTVSSASTKGP | |
| | (Fc sequence | SVFPLAPSSKSTSGGTAALGCLVKDYFPEPVTVSWNSGALTSG | |
| | not shown) | VHTFPAVLQSSGLYSLSSVVTVPSSSLGTQTYICNVNHKPSNTK | |
| | | VDKRVEPKSC | |
| | First Half | EIVMTQSPATLSVSPGERATLSCRASQDVGTAVAWYQQKPGQ | 764 |
| | Antibody | APRLLIYWASTRHTGIPARFSGSGSGTEFTLTISSLQSEDFAVYF | |
| | Light Chain | CQQYSSYPYTFGQGTKLEIKRTVAAPSVFIFPPSDEQLKSGTAS | |
| | | VVCLLNNFYPREAKVQWKVDNALQSGNSQESVTEQDSKDSTY | |
| | | SLSSTLTLSKADYEKHKVYACEVTHQGLSSPVTKSFNRGEC | |
| | Second Half | EVQLVESGGGLVQPGGSLKLSCAASGFTFNTYAMNWVRQAS | 767 |
| | Antibody | GKGLEWVGRIRSKYNNYATYYADSVKDRFTISRDDSKSTLYLQ | |
| | (Fc sequence | MNSLKTEDTAVYYCVRHGNFGNSYVSWFAYWGQGTLVTVSS | |
| | not shown) | GGGGSGGGGSGGGGSGGGGSQAVVTQEPSLTVSPGGTVTLT | |
| | | CRSSTGAVTTSNYANWVQQKPGQAPRGLIGGTNKRAPWTPA | |
| | | RFSGSLLGDKAALTLSGAQPEDEAEYFCALWYSNLWVFGGGT | |
| | | KLTVLGGGGS | |

[0953] Table 19A-2 below shows the full length amino acid sequences of the constructs shown in Table 19A-1, including Fc sequences.

TABLE 19A-2
Amino acid sequences

| | | | SEQ |
|---|---|---|---|
| Construct | Chain | | ID |
| Name | Description | Amino Acid Sequence | NO: |
| CD3hi | First Half | QVQLVQSGAEVKKPGASVKVSCKASGYTFTTYWIQW | 1077 |
| TSP1 | Antibody | VRQAPGQRLEWMGAVYPGDADTRYTQKFQGRVTLT | |
| | Heavy Chain | ADRSASTAYMELSSLRSEDTAVYYCGRDAGLEYYAL | |
| | (includes Fc | DYWGQGTLVTVSSASTKGPSVFPLAPSSKSTSGGTA | |
| | sequence) | ALGCLVKDYFPEPVTVSWNSGALTSGVHTFPAVLQS | |
| | | SGLYSLSSVVTVPSSSLGTQTYICNVNHKPSNTKVDK | |
| | | RVEPKSCGGGGSGGGGSEVQLVESGGGLVQPGGSL | |
| | | KLSCAASGFTFNTYAMNWVRQASGKGLEWVGRIRSK | |
| | | YNNYATYYADSVKDRFTISRDDSKSTLYLQMNSLKTE | |
| | | DTAVYYCVRHGNFGNSYVSWFAYWGQGTLVTVSSG | |
| | | GGGSGGGGSGGGGSGGGGSQAVVTQEPSLTVSPG | |
| | | GTVTLTCRSSTGAVTTSNYANWVQQKPGQAPRGLIG | |
| | | GTNKRAPWTPARFSGSLLGDKAALTLSGAQPEDEAE | |
| | | YFCALWYSNLWVFGGGTKLTVLGGGGSDKTHTCPP | |
| | | CPAPELLGGPSVFLFPPKPKDTLMISRTPEVTCVVVA | |
| | | VSHEDPEVKFNWYVDGVEVHNAKTKPREEQYASTYR | |
| | | VVSVLTVLHQDWLNGKEYKCKVSNKALAAPIEKTISKA | |
| | | KGQPREPQVCTLPPSREEMTKNQVSLSCAVKGFYPS | |
| | | DIAVEWESNGQPENNYKTTPPVLDSDGSFFLVSKLTV | |
| | | DKSRWQQGNVFSCSVMHEALHNHYTQKSLSLSPGK | |
| | First Half | EIVMTQSPATLSVSPGERATLSCRASQDVGTAVAWY | 759 |
| | Antibody | QQKPGQAPRLLIYWASTRHTGIPARFSGSGSGTEFTL | |
| | Light Chain | TISSLQSEDFAVYFCQQYANFPLYTFGQGTKLEIKRTV | |
| | | AAPSVFIFPPSDEQLKSGTASVVCLLNNFYPREAKVQ | |
| | | WKVDNALQSGNSQESVTEQDSKDSTYSLSSTLTLSK | |
| | | ADYEKHKVYACEVTHQGLSSPVTKSFNRGEC | |
| | Second Half | SQQIYGVVYGNVTFHVPSNVPLKEVLWKKQKDKVAE | 1078 |
| | Antibody | LENSEFRAFSSFKNRVYLDTVSGSLTIYNLTSSDEDEY | |
| | (includes Fc | EMESPNITDTMKFFLYVLESGGGGSDKTHTCPPCPA | |
| | sequence) | PELLGGPSVFLFPPKPKDTLMISRTPEVTCVVVAVSH | |
| | | EDPEVKFNWYVDGVEVHNAKTKPREEQYASTYRVVS | |
| | | VLTVLHQDWLNGKEYKCKVSNKALAAPIEKTISKAKG | |
| | | QPREPQVYTLPPCREEMTKNQVSLWCLVKGFYPSDI | |
| | | AVEWESNGQPENNYKTTPPVLDSDGSFFLYSKLTVD | |
| | | KSRWQQGNVFSCSVMHEALHNRYTQKSLSLSPGK | |
| CD3med | First Half | QVQLVQSGAEVKKPGASVKVSCKASGYTFTTYWIQW | 1079 |
| TSP1 | Antibody | VRQAPGQRLEWMGAVYPGDADTRYTQKFQGRVTLT | |
| | Heavy Chain | ADRSASTAYMELSSLRSEDTAVYYCGRDAGLEYYAL | |
| | (includes Fc | DYWGQGTLVTVSSASTKGPSVFPLAPSSKSTSGGTA | |
| | sequence) | ALGCLVKDYFPEPVTVSWNSGALTSGVHTFPAVLQS | |
| | | SGLYSLSSVVTVPSSSLGTQTYICNVNHKPSNTKVDK | |
| | | RVEPKSCGGGGSGGGGSEVQLVESGGGLVQPGGSL | |
| | | KLSCAASGFTFNTYAMNWVRQASGKGLEWVGRIRSK | |
| | | YNNYATYYADSVKDRFTISRDDSKNTAYLQMNSLKTE | |
| | | DTAVYYCVRHGNFGNSYVSWFAHWGQGTLVTVSSG | |
| | | GGGSGGGGSGGGGSGGGGSQAVVTQEPSLTVSPG | |
| | | GTVTLTCGSSTGAVTSSNYANWVQQKPGQAPRGLIG | |
| | | GTNKRAPWTPARFSGSLLGGKAALTLSGAQPEDEAE | |
| | | YYCALWYSNLWVFGGGTKLTVLGGGGSDKTHTCPP | |
| | | CPAPELLGGPSVFLFPPKPKDTLMISRTPEVTCVVVA | |
| | | VSHEDPEVKFNWYVDGVEVHNAKTKPREEQYASTYR | |
| | | VVSVLTVLHQDWLNGKEYKCKVSNKALAAPIEKTISKA | |
| | | KGQPREPQVCTLPPSREEMTKNQVSLSCAVKGFYPS | |
| | | DIAVEWESNGQPENNYKTTPPVLDSDGSFFLVSKLTV | |
| | | DKSRWQQGNVFSCSVMHEALHNHYTQKSLSLSPGK | |
| | First Half | EIVMTQSPATLSVSPGERATLSCRASQDVGTAVAWY | 759 |
| | Antibody | QQKPGQAPRLLIYWASTRHTGIPARFSGSGSGTEFTL | |
| | Light Chain | TISSLQSEDFAVYFCQQYANFPLYTFGQGTKLEIKRTV | |
| | | AAPSVFIFPPSDEQLKSGTASVVCLLNNFYPREAKVQ | |
| | | WKVDNALQSGNSQESVTEQDSKDSTYSLSSTLTLSK | |
| | | ADYEKHKVYACEVTHQGLSSPVTKSFNRGEC | |
| | Second Half | SQQIYGVVYGNVTFHVPSNVPLKEVLWKKQKDKVAE | 1078 |
| | Antibody | LENSEFRAFSSFKNRVYLDTVSGSLTIYNLTSSDEDEY | |
| | (includes Fc | EMESPNITDTMKFFLYVLESGGGGSDKTHTCPPCPA | |
| | sequence) | PELLGGPSVFLFPPKPKDTLMISRTPEVTCVVVAVSH | |
| | | EDPEVKFNWYVDGVEVHNAKTKPREEQYASTYRVVS | |
| | | VLTVLHQDWLNGKEYKCKVSNKALAAPIEKTISKAKG | |
| | | QPREPQVYTLPPCREEMTKNQVSLWCLVKGFYPSDI | |
| | | AVEWESNGQPENNYKTTPPVLDSDGSFFLYSKLTVD | |
| | | KSRWQQGNVFSCSVMHEALHNRYTQKSLSLSPGK | |
| CD3lo | First Half | QVQLVQSGAEVKKPGASVKVSCKASGYTFTTYWIQW | 1080 |
| TSP1 | Antibody | VRQAPGQRLEWMGAVYPGDADTRYTQKFQGRVTLT | |
| | Heavy Chain | ADRSASTAYMELSSLRSEDTAVYYCGRDAGLEYYAL | |
| | (includes Fc | DYWGQGTLVTVSSASTKGPSVFPLAPSSKSTSGGTA | |
| | sequence) | ALGCLVKDYFPEPVTVSWNSGALTSGVHTFPAVLQS | |
| | | SGLYSLSSVVTVPSSSLGTQTYICNVNHKPSNTKVDK | |
| | | RVEPKSCGGGGSGGGGSEVQLVESGGGLVQPGGSL | |
| | | KLSCAASGFTFNTYAMNWVRQASGKGLEWVGRIRSK | |
| | | YNNYATYYADSVKDRFTISRDDSKSTAYLQMNSLKTE | |
| | | DTAVYYCVRHGNFGNSYVSWFAYWGQGTLVTVSSG | |
| | | GGGSGGGGSGGGGSGGGGSQAVVTQEPSLTVSPG | |
| | | GTVTLTCRSSTGAVTTSNYANWVQQKPGQAPRGLIG | |
| | | GTNKRAPWTPARFSGSLLGDKAALTLSGAQPEDEAE | |
| | | YFCALWYSNLWVFGGGTKLTVLGGGGSDKTHTCPP | |
| | | CPAPELLGGPSVFLFPPKPKDTLMISRTPEVTCVVVA | |
| | | VSHEDPEVKFNWYVDGVEVHNAKTKPREEQYASTYR | |
| | | VVSVLTVLHQDWLNGKEYKCKVSNKALAAPIEKTISKÅ | |
| | | KGQPREPQVCTLPPSREEMTKNQVSLSCAVKGFYPS | |
| | | DIAVEWESNGQPENNYKTTPPVLDSDGSFFLVSKLTV | |
| | | DKSRWQQGNVFSCSVMHEALHNHYTQKSLSLSPGK | |
| | First Half | EIVMTQSPATLSVSPGERATLSCRASQDVGTAVAWY | 759 |
| | Antibody | QQKPGQAPRLLIYWASTRHTGIPARFSGSGSGTEFTL | |
| | Light Chain | TISSLQSEDFAVYFCQQYANFPLYTFGQGTKLEIKRTV | |
| | | AAPSVFIFPPSDEQLKSGTASVVCLLNNFYPREAKVQ | |
| | | WKVDNALQSGNSQESVTEQDSKDSTYSLSSTLTLSK | |
| | | ADYEKHKVYACEVTHQGLSSPVTKSFNRGEC | |
| | Second Half | SQQIYGVVYGNVTFHVPSNVPLKEVLWKKQKDKVAE | 1078 |
| | Antibody | LENSEFRAFSSFKNRVYLDTVSGSLTIYNLTSSDEDEY | |
| | (includes Fc | EMESPNITDTMKFFLYVLESGGGGSDKTHTCPPCPA | |
| | sequence) | PELLGGPSVFLFPPKPKDTLMISRTPEVTCVVVAVSH | |
| | | EDPEVKFNWYVDGVEVHNAKTKPREEQYASTYRVVS | |
| | | VLTVLHQDWLNGKEYKCKVSNKALAAPIEKTISKAKG | |
| | | QPREPQVYTLPPCREEMTKNQVSLWCLVKGFYPSDI | |
| | | AVEWESNGQPENNYKTTPPVLDSDGSFFLYSKLTVD | |
| | | KSRWQQGNVFSCSVMHEALHNRYTQKSLSLSPGK | |
| CD3hi | First Half | EVQLVQSGAEVKKPGESLKISCKASGYSFTNYWMNW | 1081 |
| TSP2 | Antibody | VRQMPGKGLEWMGMIHPSDSEIRLNQKFQGQVTLSV | |
| | Heavy Chain | DKSIGTAYMQWSSLKASDTAMYYCSRWYYLSSPMD | |
| | (includes Fc | YWGQGTTVTVSSASTKGPSVFPLAPSSKSTSGGTAA | |
| | sequence) | LGCLVKDYFPEPVTVSWNSGALTSGVHTFPAVLQSS | |
| | | GLYSLSSVVTVPSSSLGTQTYICNVNHKPSNTKVDKR | |
| | | VEPKSCGGGGSGGGGSEVQLVESGGGLVQPGGSLK | |
| | | LSCAASGFTFNTYAMNWVRQASGKGLEWVGRIRSKY | |
| | | NNYATYYADSVKDRFTISRDDSKSTLYLQMNSLKTED | |
| | | TAVYYCVRHGNFGNSYVSWFAYWGQGTLVTVSSGG | |
| | | GGSGGGGSGGGGSGGGGSQAVVTQEPSLTVSPGG | |
| | | TVTLTCRSSTGAVTTSNYANWVQQKPGQAPRGLIGG | |
| | | TNKRAPWTPARFSGSLLGDKAALTLSGAQPEDEAEY | |
| | | FCALWYSNLWVFGGGTKLTVLGGGGSDKTHTCPPC | |
| | | PAPELLGGPSVFLFPPKPKDTLMISRTPEVTCVVVAVS | |
| | | HEDPEVKFNWYVDGVEVHNAKTKPREEQYASTYRVV | |
| | | SVLTVLHQDWLNGKEYKCKVSNKALAAPIEKTISKAK | |
| | | GQPREPQVCTLPPSREEMTKNQVSLSCAVKGFYPSD | |
| | | IAVEWESNGQPENNYKTTPPVLDSDGSFFLVSKLTVD | |
| | | KSRWQQGNVFSCSVMHEALHNHYTQKSLSLSPGK | |
| | First Half | EIVMTQSPATLSVSPGERATLSCRASQDVGTAVAWY | 764 |
| | Antibody | QQKPGQAPRLLIYWASTRHTGIPARFSGSGSGTEFTL | |
| | Light Chain | TISSLQSEDFAVYFCQQYSSYPYTFGQGTKLEIKRTVA | |
| | | APSVFIFPPSDEQLKSGTASVVCLLNNFYPREAKVQW | |
| | | KVDNALQSGNSQESVTEQDSKDSTYSLSSTLTLSKAD | |
| | | YEKHKVYACEVTHQGLSSPVTKSFNRGEC | |
| | Second Half | SQQIYGVVYGNVTFHVPSNVPLKEVLWKKQKDKVAE | 1078 |
| | Antibody | LENSEFRAFSSFKNRVYLDTVSGSLTIYNLTSSDEDEY | |
| | (includes Fc | EMESPNITDTMKFFLYVLESGGGGSDKTHTCPPCPA | |
| | sequence) | PELLGGPSVFLFPPKPKDTLMISRTPEVTCVVVAVSH | |
| | | EDPEVKFNWYVDGVEVHNAKTKPREEQYASTYRVVS | |
| | | VLTVLHQDWLNGKEYKCKVSNKALAAPIEKTISKAKG | |
| | | QPREPQVYTLPPCREEMTKNQVSLWCLVKGFYPSDI | |
| | | AVEWESNGQPENNYKTTPPVLDSDGSFFLYSKLTVD | |
| | | KSRWQQGNVFSCSVMHEALHNRYTQKSLSLSPGK | |
| CD3hi | First Half | QVQLVQSGAEVKKPGASVKVSCKASGYTFTTYWIQW | 1077 |
| TSP1L | Antibody | VRQAPGQRLEWMGAVYPGDADTRYTQKFQGRVTLT | |
| | Heavy Chain | ADRSASTAYMELSSLRSEDTAVYYCGRDAGLEYYAL | |
| | (includes Fc | DYWGQGTLVTVSSASTKGPSVFPLAPSSKSTSGGTA | |
| | sequence) | ALGCLVKDYFPEPVTVSWNSGALTSGVHTFPAVLQS | |
| | | SGLYSLSSVVTVPSSSLGTQTYICNVNHKPSNTKVDK | |
| | | RVEPKSCGGGGSGGGGSEVQLVESGGGLVQPGGSL | |
| | | KLSCAASGFTFNTYAMNWVRQASGKGLEWVGRIRSK | |
| | | YNNYATYYADSVKDRFTISRDDSKSTLYLQMNSLKTE | |
| | | DTAVYYCVRHGNFGNSYVSWFAYWGQGTLVTVSSG | |
| | | GGGSGGGGSGGGGSGGGGSQAVVTQEPSLTVSPG | |
| | | GTVTLTCRSSTGAVTTSNYANWVQQKPGQAPRGLIG | |
| | | GTNKRAPWTPARFSGSLLGDKAALTLSGAQPEDEAE | |
| | | YFCALWYSNLWVFGGGTKLTVLGGGGSDKTHTCPP | |
| | | CPAPELLGGPSVFLFPPKPKDTLMISRTPEVTCVVVA | |
| | | VSHEDPEVKFNWYVDGVEVHNAKTKPREEQYASTYR | |
| | | VVSVLTVLHQDWLNGKEYKCKVSNKALAAPIEKTISKA | |
| | | KGQPREPQVCTLPPSREEMTKNQVSLSCAVKGFYPS | |
| | | DIAVEWESNGQPENNYKTTPPVLDSDGSFFLVSKLTV | |
| | | DKSRWQQGNVFSCSVMHEALHNHYTQKSLSLSPGK | |
| | First Half | EIVMTQSPATLSVSPGERATLSCRASQDVGTAVAWY | 759 |
| | Antibody | QQKPGQAPRLLIYWASTRHTGIPARFSGSGSGTEFTL | |
| | Light Chain | TISSLQSEDFAVYFCQQYANFPLYTFGQGTKLEIKRTV | |
| | | AAPSVFIFPPSDEQLKSGTASVVCLLNNFYPREAKVQ | |
| | | WKVDNALQSGNSQESVTEQDSKDSTYSLSSTLTLSK | |
| | | ADYEKHKVYACEVTHQGLSSPVTKSFNRGEC | |
| | Second Half | DVQLQASGGGSVQAGGSLRLSCAASGYTIGPYCMG | 1082 |
| | Antibody | WFRQAPGKEREGVAAINMGGGITYYADSVKGRFTIS | |
| | (includes Fc | QDNAKNTVYLLMNSLEPEDTAIYYCAADSTIYASYYEC | |
| | sequence) | GHGLSTGGYGYDSWGQGTQVTVSSGGGGSDKTHT | |
| | | CPPCPAPELLGGPSVFLFPPKPKDTLMISRTPEVTCV | |
| | | VVAVSHEDPEVKFNWYVDGVEVHNAKTKPREEQYAS | |
| | | TYRVVSVLTVLHQDWLNGKEYKCKVSNKALAAPIEKTI | |
| | | SKAKGQPREPQVYTLPPCREEMTKNQVSLWCLVKGF | |
| | | YPSDIAVEWESNGQPENNYKTTPPVLDSDGSFFLYSK | |
| | | LTVDKSRWQQGNVFSCSVMHEALHNRYTQKSLSLSP | |
| | | GK | |
| CD3hi | First Half | EVQLVQSGAEVKKPGESLKISCKASGYSFTNYWMNW | 1081 |
| TSP2L | Antibody | VRQMPGKGLEWMGMIHPSDSEIRLNQKFQGQVTLSV | |
| | Heavy Chain | DKSIGTAYMQWSSLKASDTAMYYCSRWYYLSSPMD | |
| | (includes Fc | YWGQGTTVTVSSASTKGPSVFPLAPSSKSTSGGTAA | |
| | sequence) | LGCLVKDYFPEPVTVSWNSGALTSGVHTFPAVLQSS | |
| | | GLYSLSSVVTVPSSSLGTQTYICNVNHKPSNTKVDKR | |
| | | VEPKSCGGGGSGGGGSEVQLVESGGGLVQPGGSLK | |
| | | LSCAASGFTFNTYAMNWVRQASGKGLEWVGRIRSKY | |
| | | NNYATYYADSVKDRFTISRDDSKSTLYLQMNSLKTED | |
| | | TAVYYCVRHGNFGNSYVSWFAYWGQGTLVTVSSGG | |
| | | GGSGGGGSGGGGSGGGGSQAVVTQEPSLTVSPGG | |
| | | TVTLTCRSSTGAVTTSNYANWVQQKPGQAPRGLIGG | |
| | | TNKRAPWTPARFSGSLLGDKAALTLSGAQPEDEAEY | |
| | | FCALWYSNLWVFGGGTKLTVLGGGGSDKTHTCPPC | |
| | | PAPELLGGPSVFLFPPKPKDTLMISRTPEVTCVVVAVS | |
| | | HEDPEVKFNWYVDGVEVHNAKTKPREEQYASTYRVV | |
| | | SVLTVLHQDWLNGKEYKCKVSNKALAAPIEKTISKAK | |
| | | GQPREPQVCTLPPSREEMTKNQVSLSCAVKGFYPSD | |
| | | IAVEWESNGQPENNYKTTPPVLDSDGSFFLVSKLTVD | |
| | | KSRWQQGNVFSCSVMHEALHNHYTQKSLSLSPGK | |
| | First Half | EIVMTQSPATLSVSPGERATLSCRASQDVGTAVAWY | 764 |
| | Antibody | QQKPGQAPRLLIYWASTRHTGIPARFSGSGSGTEFTL | |
| | Light Chain | TISSLQSEDFAVYFCQQYSSYPYTFGQGTKLEIKRTVA | |
| | | APSVFIFPPSDEQLKSGTASVVCLLNNFYPREAKVQW | |
| | | KVDNALQSGNSQESVTEQDSKDSTYSLSSTLTLSKAD | |
| | | YEKHKVYACEVTHQGLSSPVTKSFNRGEC | |
| | Second Half | DVQLQASGGGSVQAGGSLRLSCAASGYTIGPYCMG | 1082 |
| | Antibody | WFRQAPGKEREGVAAINMGGGITYYADSVKGRFTIS | |
| | (includes Fc | QDNAKNTVYLLMNSLEPEDTAIYYCAADSTIYASYYEC | |
| | sequence) | GHGLSTGGYGYDSWGQGTQVTVSSGGGGSDKTHT | |
| | | CPPCPAPELLGGPSVFLFPPKPKDTLMISRTPEVTCV | |
| | | VVAVSHEDPEVKFNWYVDGVEVHNAKTKPREEQYAS | |
| | | TYRVVSVLTVLHQDWLNGKEYKCKVSNKALAAPIEKTI | |
| | | SKAKGQPREPQVYTLPPCREEMTKNQVSLWCLVKGF | |
| | | YPSDIAVEWESNGQPENNYKTTPPVLDSDGSFFLYSK | |
| | | LTVDKSRWQQGNVFSCSVMHEALHNRYTQKSLSLSP | |
| | | GK | |
| CD3hi | First Half | QVQLVQSGAEVKKPGASVKVSCKASGYTFTTYWIQW | 1083 |
| BSP1-2 | Antibody | VRQAPGQRLEWMGAVYPGDADTRYTQKFQGRVTLT | |
| arm | Heavy Chain | ADRSASTAYMELSSLRSEDTAVYYCGRDAGLEYYAL | |
| | (includes Fc | DYWGQGTLVTVSSASTKGPSVFPLAPSSKSTSGGTA | |
| | sequence) | ALGCLVKDYFPEPVTVSWNSGALTSGVHTFPAVLQS | |
| | | SGLYSLSSVVTVPSSSLGTQTYICNVNHKPSNTKVDK | |
| | | RVEPKSCDKTHTCPPCPAPELLGGPSVFLFPPKPKDT | |
| | | LMISRTPEVTCVVVAVSHEDPEVKFNWYVDGVEVHN | |
| | | AKTKPREEQYASTYRVVSVLTVLHQDWLNGKEYKCK | |
| | | VSNKALAAPIEKTISKAKGQPREPQVCTLPPSREEMT | |
| | | KNQVSLSCAVKGFYPSDIAVEWESNGQPENNYKTTP | |
| | | PVLDSDGSFFLVSKLTVDKSRWQQGNVFSCSVMHEA | |
| | | LHNHYTQKSLSLSPGK | |
| | First Half | EIVMTQSPÅTLSVSPGERATLSCRASQDVGTAVAWY | 759 |
| | Antibody | QQKPGQAPRLLIYWASTRHTGIPARFSGSGSGTEFTL | |
| | Light Chain | TISSLQSEDFAVYFCQQYANFPLYTFGQGTKLEIKRTV | |
| | | AAPSVFIFPPSDEQLKSGTASVVCLLNNFYPREAKVQ | |
| | | WKVDNALQSGNSQESVTEQDSKDSTYSLSSTLTLSK | |
| | | ADYEKHKVYACEVTHQGLSSPVTKSFNRGEC | |
| | Second Half | EVQLVESGGGLVQPGGSLKLSCAASGFTFNTYAMN | 1084 |
| | Antibody | WVRQASGKGLEWVGRIRSKYNNYATYYADSVKDRFT | |
| | (includes Fc | ISRDDSKSTLYLQMNSLKTEDTAVYYCVRHGNFGNSY | |
| | sequence) | VSWFAYWGQGTLVTVSSGGGGSGGGGSGGGGSG | |
| | | GGGSQAVVTQEPSLTVSPGGTVTLTCRSSTGAVTTS | |
| | | NYANWVQQKPGQAPRGLIGGTNKRAPWTPARFSGS | |
| | | LLGDKAALTLSGAQPEDEAEYFCALWYSNLWVFGGG | |
| | | TKLTVLGGGGSDKTHTCPPCPAPELLGGPSVFLFPPK | |
| | | PKDTLMISRTPEVTCVVVAVSHEDPEVKFNWYVDGV | |
| | | EVHNAKTKPREEQYASTYRVVSVLTVLHQDWLNGKE | |
| | | YKCKVSNKALAAPIEKTISKAKGQPREPQVYTLPPCR | |
| | | EEMTKNQVSLWCLVKGFYPSDIAVEWESNGQPENNY | |
| | | KTTPPVLDSDGSFFLYSKLTVDKSRWQQGNVFSCSV | |
| | | MHEALHNRYTQKSLSLSPGK | |
| CD3hi | First Half | EVQLVQSGAEVKKPGESLKISCKASGYSFTNYWMNW | 1085 |
| BSP2-2 | Antibody | VRQMPGKGLEWMGMIHPSDSEIRLNQKFQGQVTLSV | |
| arm | Heavy Chain | DKSIGTAYMQWSSLKASDTAMYYCSRWYYLSSPMD | |
| | (includes Fc | YWGQGTTVTVSSASTKGPSVFPLAPSSKSTSGGTAA | |
| | sequence) | LGCLVKDYFPEPVTVSWNSGALTSGVHTFPAVLQSS | |
| | | GLYSLSSVVTVPSSSLGTQTYICNVNHKPSNTKVDKR | |
| | | VEPKSCDKTHTCPPCPAPELLGGPSVFLFPPKPKDTL | |
| | | MISRTPEVTCVVVAVSHEDPEVKFNWYVDGVEVHNA | |
| | | KTKPREEQYASTYRVVSVLTVLHQDWLNGKEYKCKV | |
| | | SNKALAAPIEKTISKAKGQPREPQVCTLPPSREEMTK | |
| | | NQVSLSCAVKGFYPSDIAVEWESNGQPENNYKTTPP | |
| | | VLDSDGSFFLVSKLTVDKSRWQQGNVFSCSVMHEAL | |
| | | HNHYTQKSLSLSPGK | |
| | First Half | EIVMTQSPATLSVSPGERATLSCRASQDVGTAVAWY | 764 |
| | Antibody | QQKPGQAPRLLIYWASTRHTGIPARFSGSGSGTEFTL | |
| | Light Chain | TISSLQSEDFAVYFCQQYSSYPYTFGQGTKLEIKRTVA | |
| | | APSVFIFPPSDEQLKSGTASVVCLLNNFYPREAKVQW | |
| | | KVDNALQSGNSQESVTEQDSKDSTYSLSSTLTLSKAD | |
| | | YEKHKVYACEVTHQGLSSPVTKSFNRGEC | |
| | Second Half | EVQLVESGGGLVQPGGSLKLSCAASGFTFNTYAMN | 1084 |
| | Antibody | WVRQASGKGLEWVGRIRSKYNNYATYYADSVKDRFT | |
| | (includes Fc | ISRDDSKSTLYLQMNSLKTEDTAVYYCVRHGNFGNSY | |
| | sequence) | VSWFAYWGQGTLVTVSSGGGGSGGGGSGGGGSG | |
| | | GGGSQAVVTQEPSLTVSPGGTVTLTCRSSTGAVTTS | |
| | | NYANWVQQKPGQAPRGLIGGTNKRAPWTPARFSGS | |
| | | LLGDKAALTLSGAQPEDEAEYFCALWYSNLWVFGGG | |
| | | TKLTVLGGGGSDKTHTCPPCPAPELLGGPSVFLFPPK | |
| | | PKDTLMISRTPEVTCVVVAVSHEDPEVKFNWYVDGV | |
| | | EVHNAKTKPREEQYASTYRVVSVLTVLHQDWLNGKE | |
| | | YKCKVSNKALAAPIEKTISKAKGQPREPQVYTLPPCR | |
| | | EEMTKNQVSLWCLVKGFYPSDIAVEWESNGQPENNY | |
| | | KTTPPVLDSDGSFFLYSKLTVDKSRWQQGNVFSCSV | |
| | | MHEALHNRYTQKSLSLSPGK | |

[0954] 8.1.1.1.2. Expression and Purification

[0955] BBMs and TBMs were expressed transiently by co-transfection of the respective chains in HEK293 cells. Briefly, transfection of the cells with the heavy and light chain plasmids was performed using PEI as transfection reagent with a final DNA: PEI ratio of 1:3. 1 mg of plasmid per liter of culture was used for transfection of cultures having 2.0 million cells/mL of serum media. After 5 days of expression, BBMs and TBMs were harvested by clarification of the media via centrifugation and filtration. Purification was performed via anti-CH1 affinity batch binding (CaptureSelect IgG-CH1 Affinity Matrix, Thermo-Fisher Scientific, Waltham, MA, USA) or Protein A (rProteinA Sepharose, Fast flow, GE Healthcare, Uppsala, Sweden) batch binding using 1 ml resin/100 mL supernatant. The protein was allowed to bind for a minimum of 2 hours with gentle mixing, and the supernatant loaded onto a gravity filtration column. The resin was washed with 20-50 CV of PBS. BBMs and TBMs were eluted with 20 CV of 50 mM citrate, 90 mM NaCl pH 3.2. 50 mM sucrose. The eluted BBM and TBM fractions were adjusted to pH 5.5 with 1 M sodium citrate 50 mM sucrose. Preparative size exclusion chromatography was performed using Hi Load 16/60 Superdex 200 grade column (GE Healthcare Life Sciences, Uppsala, Sweden) as a final polishing step when aggregates were present. To confirm that the identity of the proteins of the BBMs and TBMs expressed matched the predicted masses for the primary amino acid sequences, proteins were analyzed by high-performance liquid chromatography coupled to mass spectrometry.

[0956] 8.1.1.1.3. CD3 Affinity Measurements

[0957] The affinity of the CD3hi, CD3med, and CD3lo mAbs to CD3 were determined at 25° C. using a Biacore T200 system. Briefly, anti-hFc IgG1 was immobilized on a CM5 chip. After capturing CD3-Fc (1 μg/ml in HBS-EP+ buffer, flow rate of 50 μl/min, with a 30 second injection time) kinetic data was acquired by subsequent injections of 1:2 dilution series of the different antibodies in HBS-EP+ buffer.

[0958] Data were evaluated using the Biacore T200 evaluation software version 1.0. The raw data were double referenced, i.e. the response of the measuring flow cell was corrected for the response of the reference flow cell, and in a second step the response of a blank injection was subtracted. Finally, the sensorgrams were fitted by applying 1:1 binding model to calculate kinetic rate constants and dissociation equilibrium constants. Rₘₐₓ was set at local. Data were processed individually for each run.

### 8.1.2. Example 11B: Additional BBM and TBM Constructs

[0959] A one-arm BBM having a CD3 ABM and a CD19 ABM (CD3hi BSP1, shown schematically in FIG. 3C) and a TBM corresponding to CD3hi TSP1 but with a lysozyme binding arm in place of the CD19 binding arm (CD3hi TSP1C) were produced. The amino acid sequences of the CD3hi BSP1 and CD3hi TSP1C constructs are shown in Table 19B.

TABLE 19B
Amino acid sequences

| Con- | Chain | | SEQ |
|---|---|---|---|
| struct | Des- | | ID |
| Name | cription | Amino Acid Sequence | NO: |
| CD3hi | First | QVQLVQSGAEVKKPGASVKVSCKASGYT | 1077 |
| BSP1 | Half | FTTYWIQWVRQAPGQRLEWMGAVYPGDA | |
| | Antibody | DTRYTQKFQGRVTLTADRSASTAYMELS | |
| | Heavy | SLRSEDTAVYYCGRDAGLEYYALDYWGQ | |
| | Chain | GTLVTVSSASTKGPSVFPLAPSSKSTSG | |
| | (in- | GTAALGCLVKDYFPEPVTVSWNSGALTS | |
| | cludes | GVHTFPAVLQSSGLYSLSSVVTVPSSSL | |
| | Fc | GTQTYICNVNHKPSNTKVDKRVEPKSCG | |
| | se- | GGGSGGGGSEVQLVESGGGLVQPGGSLK | |
| | quence) | LSCAASGFTFNTYAMNWVRQASGKGLEW | |
| | | VGRIRSKYNNYATYYADSVKDRFTISRD | |
| | | DSKSTLYLQMNSLKTEDTAVYYCVRHGN | |
| | | FGNSYVSWFAYWGQGTLVTVSSGGGGSG | |
| | | GGGSGGGGSGGGGSQAVVTQEPSLTVSP | |
| | | GGTVTLTCRSSTGAVTTSNYANWVQQKP | |
| | | GQAPRGLIGGTNKRAPWTPARFSGSLLG | |
| | | DKAALTLSGAQPEDEAEYFCALWYSNLW | |
| | | VFGGGTKLTVLGGGGSDKTHTCPPCPAP | |
| | | ELLGGPSVFLFPPKPKDTLMISRTPEVT | |
| | | CVVVAVSHEDPEVKFNWYVDGVEVHNAK | |
| | | TKPREEQYASTYRVVSVLTVLHQDWLNG | |
| | | KEYKCKVSNKALAAPIEKTISKAKGQPR | |
| | | EPQVCTLPPSREEMTKNQVSLSCAVKGF | |
| | | YPSDIAVEWESNGQPENNYKTTPPVLDS | |
| | | DGSFFLVSKLTVDKSRWQQGNVFSCSVM | |
| | | HEALHNHYTQKSLSLSPGK | |
| | First | EIVMTQSPATLSVSPGERATLSCRASQD | 759 |
| | Half | VGTAVAWYQQKPGQAPRLLIYWASTRHT | |
| | Antibody | GIPARFSGSGSGTEFTLTISSLQSEDFA | |
| | Light | VYFCQQYANFPLYTFGQGTKLEIKRTVA | |
| | Chain | APSVFIFPPSDEQLKSGTASVVCLLNNF | |
| | | YPREAKVQWKVDNALQSGNSQESVTEQD | |
| | | SKDSTYSLSSTLTLSKADYEKHKVYACE | |
| | | VTHQGLSSPVTKSFNRGEC | |
| | Second | DKTHTCPPCPAPELLGGPSVFLFPPKPK | 1102 |
| | Half | DTLMISRTPEVTCVVVAVSHEDPEVKFN | |
| | Antibody | WYVDGVEVHNAKTKPREEQYASTYRVVS | |
| | (in- | VLTVLHQDWLNGKEYKCKVSNKALAAPI | |
| | cludes | EKTISKAKGQPREPQVYTLPPCREEMTK | |
| | Fc | NQVSLWCLVKGFYPSDIAVEWESNGQPE | |
| | se- | NNYKTTPPVLDSDGSFFLYSKLTVDKSR | |
| | quence) | WQQGNVFSCSVMHEALHNRYTQKSLSLS | |
| | | PGK | |
| CD3hi | First | QVQLQQSGPGLVKPSQTLSLTCAISGDS | 1100 |
| TSP1C | Half | VSSNSAAWSWIRQSPGRGLEWLGRIYYR | |
| | Antibody | SKWYNDYAVSVKSRITINPDTSKNQFSL | |
| | Heavy | QLNSVTPEDTAVYYCARLDHRYHEDTVY | |
| | Chain | PGMDVWGQGTLVTVSSASTKGPSVFPLA | |
| | (in- | PSSKSTSGGTAALGCLVKDYFPEPVTVS | |
| | cludes | WNSGALTSGVHTFPAVLQSSGLYSLSSV | |
| | Fc | VTVPSSSLGTQTYICNVNHKPSNTKVDK | |
| | se- | RVEPKSCGGGGSGGGGSEVQLVESGGGL | |
| | quence) | VQPGGSLKLSCAASGFTFNTYAMNWVRQ | |
| | | ASGKGLEWVGRIRSKYNNYATYYADSVK | |
| | | DRFTISRDDSKSTLYLQMNSLKTEDTAV | |
| | | YYCVRHGNFGNSYVSWFAYWGQGTLVTV | |
| | | SSGGGGSGGGGSGGGGSGGGGSQAVVTQ | |
| | | EPSLTVSPGGTVTLTCRSSTGAVTTSNY | |
| | | ANWVQQKPGQAPRGLIGGTNKRAPWTPA | |
| | | RFSGSLLGDKAALTLSGAQPEDEAEYFC | |
| | | ALWYSNLWVFGGGTKLTVLGGGGSDKTH | |
| | | TCPPCPAPELLGGPSVFLFPPKPKDTLM | |
| | | ISRTPEVTCVVVAVSHEDPEVKFNWYVD | |
| | | GVEVHNAKTKPREEQYASTYRVVSVLTV | |
| | | LHQDWLNGKEYKCKVSNKALAAPIEKTI | |
| | | SKAKGQPREPQVCTLPPSREEMTKNQVS | |
| | | LSCAVKGFYPSDIAVEWESNGQPENNYK | |
| | | TTPPVLDSDGSFFLVSKLTVDKSRWQQG | |
| | | NVFSCSVMHEALHNHYTQKSLSLSPGK | |
| | First | DIELTQPPSVSVAPGQTARISCSGDNLP | 1101 |
| | Half | AYTVTWYQQKPGQAPVLVIYDDSDRPSG | |
| | Antibody | IPERFSGSNSGNTATLTISGTQAEDEAD | |
| | Light | YYCASWDPSSGVVFGGGTKLTVLGQPKA | |
| | Chain | APSVTLFPPSSEELQANKATLVCLISDF | |
| | | YPGAVTVAWKADSSPVKAGVETTTPSKQ | |
| | | SNNKYAASSYLSLTPEQWKSHRSYSCQV | |
| | | THEGSTVEKTVAPTECS | |
| | Second | SQQIYGVVYGNVTFHVPSNVPLKEVLWK | 1078 |
| | Half | KQKDKVAELENSEFRAFSSFKNRVYLDT | |
| | Antibody | VSGSLTIYNLTSSDEDEYEMESPNITDT | |
| | (in- | MKFFLYVLESGGGGSDKTHTCPPCPAPE | |
| | cludes | LLGGPSVFLFPPKPKDTLMISRTPEVTC | |
| | Fc | VVVAVSHEDPEVKFNWYVDGVEVHNAKT | |
| | se- | KPREEQYASTYRVVSVLTVLHQDWLNGK | |
| | quence) | EYKCKVSNKALAAPIEKTISKAKGQPRE | |
| | | PQVYTLPPCREEMTKNQVSLWCLVKGFY | |
| | | PSDIAVEWESNGQPENNYKTTPPVLDSD | |
| | | GSFFLYSKLTVDKSRWQQGNVFSSCSVM | |
| | | HEALHNRYTQKSLSLPGK | |

[0960] Additionally, CD3hi TSP1, CD3med TSP1, CD3hi BSP1, and CD3hi TSP1C constructs were each produced in a second version having a second half antibody sequence varying from the second half antibody sequence for the construct set forth in Table 19A-2 (in the case of CD3med TSP1 and CD3hi TSP1) or Table 19B (in the case of CD3hi BSP1 and CD3hi TSP1C) by one amino acid in the Fc sequence. Specifically, the second half antibody sequences in Table 19A-2 and Table 19B have an arginine residue where the second versions have a histidine residue. The arginine residue was included in the constructs to facilitate purification via Protein A binding. The versions of the constructs set forth in Table 19A-2 and Table 19B are referred to herein as “R variants” and the versions of the constructs set forth in Table 19C, below, are referred to herein as “H variants.” It is believed that the functional activity of a construct's R variant does not differ significantly from the functional activity of its H variant. Nucleotide sequences encoding H variants of CD3hi TSP1, CD3med TSP1, CD3hi BSP1, and CD3hi TSP1C are shown in Table 19D.

TABLE 19C
Amino acid sequences (H variants)

| | | | SEQ |
|---|---|---|---|
| Construct | Chain | | ID |
| Name | Description | Amino Acid Sequence | NO: |
| CD3hi | First Half | QVQLVQSGAEVKKPGASVKVSCKASGYTFTTYWIQWVRQ | 1077 |
| TSP1 | Antibody | APGQRLEWMGAVYPGDADTRYTQKFQGRVTLTADRSAST | |
| (H variant) | Heavy Chain | AYMELSSLRSEDTAVYYCGRDAGLEYYALDYWGQGTLVT | |
| | (includes Fc | VSSASTKGPSVFPLAPSSKSTSGGTAALGCLVKDYFPEPVT | |
| | sequence) | VSWNSGALTSGVHTFPAVLQSSGLYSLSSVVTVPSSSLGT | |
| | | QTYICNVNHKPSNTKVDKRVEPKSCGGGGSGGGGSEVQL | |
| | | VESGGGLVQPGGSLKLSCAASGFTFNTYAMNWVRQASGK | |
| | | GLEWVGRIRSKYNNYATYYADSVKDRFTISRDDSKSTLYLQ | |
| | | MNSLKTEDTAVYYCVRHGNFGNSYVSWFAYWGQGTLVTV | |
| | | SSGGGGSGGGGSGGGGSGGGGSQAVVTQEPSLTVSPG | |
| | | GTVTLTCRSSTGAVTTSNYANWVQQKPGQAPRGLIGGTN | |
| | | KRAPWTPARFSGSLLGDKAALTLSGAQPEDEAEYFCALWY | |
| | | SNLWVFGGGTKLTVLGGGGSDKTHTCPPCPAPELLGGPS | |
| | | VFLFPPKPKDTLMISRTPEVTCVVVAVSHEDPEVKFNWYVD | |
| | | GVEVHNAKTKPREEQYASTYRVVSVLTVLHQDWLNGKEY | |
| | | KCKVSNKALAAPIEKTISKAKGQPREPQVCTLPPSREEMTK | |
| | | NQVSLSCAVKGFYPSDIAVEWESNGQPENNYKTTPPVLDS | |
| | | DGSFFLVSKLTVDKSRWQQGNVFSCSVMHEALHNHYTQK | |
| | | SLSLSPGK | |
| | First Half | EIVMTQSPATLSVSPGERATLSCRASQDVGTAVAWYQQKP | 759 |
| | Antibody | GQAPRLLIYWASTRHTGIPARFSGSGSGTEFTLTISSLQSE | |
| | Light Chain | DFAVYFCQQYANFPLYTFGQGTKLEIKRTVAAPSVFIFPPS | |
| | | DEQLKSGTASVVCLLNNFYPREAKVQWKVDNALQSGNSQ | |
| | | ESVTEQDSKDSTYSLSSTLTLSKADYEKHKVYACEVTHQG | |
| | | LSSPVTKSFNRGEC | |
| | Second Half | SQQIYGVVYGNVTFHVPSNVPLKEVLWKKQKDKVAELENS | 1086 |
| | Antibody | EFRAFSSFKNRVYLDTVSGSLTIYNLTSSDEDEYEMESPNIT | |
| | (includes Fc | DTMKFFLYVLESGGGGSDKTHTCPPCPAPELLGGPSVFLF | |
| | sequence) | PPKPKDTLMISRTPEVTCVVVAVSHEDPEVKFNWYVDGVE | |
| | | VHNAKTKPREEQYASTYRVVSVLTVLHQDWLNGKEYKCKV | |
| | | SNKALAAPIEKTISKAKGQPREPQVYTLPPCREEMTKNQVS | |
| | | LWCLVKGFYPSDIAVEWESNGQPENNYKTTPPVLDSDGSF | |
| | | FLYSKLTVDKSRWQQGNVFSCSVMHEALHNHYTQKSLSLS | |
| | | PGK | |
| CD3med | First Half | QVQLVQSGAEVKKPGASVKVSCKASGYTFTTYWIQWVRQ | 1079 |
| TSP1 | Antibody | APGQRLEWMGAVYPGDADTRYTQKFQGRVTLTADRSAST | |
| (H variant) | Heavy Chain | AYMELSSLRSEDTAVYYCGRDAGLEYYALDYWGQGTLVT | |
| | (includes Fc | VSSASTKGPSVFPLAPSSKSTSGGTAALGCLVKDYFPEPVT | |
| | sequence) | VSWNSGALTSGVHTFPAVLQSSGLYSLSSVVTVPSSSLGT | |
| | | QTYICNVNHKPSNTKVDKRVEPKSCGGGGSGGGGSEVQL | |
| | | VESGGGLVQPGGSLKLSCAASGFTFNTYAMNWVRQASGK | |
| | | GLEWVGRIRSKYNNYATYYADSVKDRFTISRDDSKNTAYL | |
| | | QMNSLKTEDTAVYYCVRHGNFGNSYVSWFAHWGQGTLV | |
| | | TVSSGGGGSGGGGSGGGGGGGGSQAVVTQEPSLTVSP | |
| | | GGTVTLTCGSSTGAVTSSNYANWVQQKPGQAPRGLIGGT | |
| | | NKRAPWTPARFSGSLLGGKAALTLSGAQPEDEAEYYCAL | |
| | | WYSNLWVFGGGTKLTVLGGGGSDKTHTCPPCPAPELLGG | |
| | | PSVFLFPPKPKDTLMISRTPEVTCVVVAVSHEDPEVKFNWY | |
| | | VDGVEVHNAKTKPREEQYASTYRVVSVLTVLHQDWLNGK | |
| | | EYKCKVSNKALAAPIEKTISKAKGQPREPQVCTLPPSREEM | |
| | | TKNQVSLSCAVKGFYPSDIAVEWESNGQPENNYKTTPPVL | |
| | | DSDGSFFLVSKLTVDKSRWQQGNVFSCSVMHEALHNHYT | |
| | | QKSLSLSPGK | |
| | First Half | EIVMTQSPATLSVSPGERATLSCRASQDVGTAVAWYQQKP | 759 |
| | Antibody | GQAPRLLIYWASTRHTGIPARFSGSGSGTEFTLTISSLQSE | |
| | Light Chain | DFAVYFCQQYANFPLYTFGQGTKLEIKRTVAAPSVFIFPPS | |
| | | DEQLKSGTASVVCLLNNFYPREAKVQWKVDNALQSGNSQ | |
| | | ESVTEQDSKDSTYSLSSTLTLSKADYEKHKVYACEVTHQG | |
| | | LSSPVTKSFNRGEC | |
| | Second Half | SQQIYGVVYGNVTFHVPSNVPLKEVLWKKQKDKVAELENS | 1086 |
| | Antibody | EFRAFSSFKNRVYLDTVSGSLTIYNLTSSDEDEYEMESPNIT | |
| | (includes Fc | DTMKFFLYVLESGGGGSDKTHTCPPCPAPELLGGPSVFLF | |
| | sequence) | PPKPKDTLMISRTPEVTCVVVAVSHEDPEVKFNWYVDGVE | |
| | | VHNAKTKPREEQYASTYRVVSVLTVLHQDWLNGKEYKCKV | |
| | | SNKALAAPIEKTISKAKGQPREPQVYTLPPCREEMTKNQVS | |
| | | LWCLVKGFYPSDIAVEWESNGQPENNYKTTPPVLDSDGSF | |
| | | FLYSKLTVDKSRWQQGNVFSCSVMHEALHNHYTQKSLSLS | |
| | | PGK | |
| CD3hi | First Half | QVQLVQSGAEVKKPGASVKVSCKASGYTFTTYWIQWVRQ | 1077 |
| BSP1 | Antibody | APGQRLEWMGAVYPGDADTRYTQKFQGRVTLTADRSAST | |
| (H variant) | Heavy Chain | AYMELSSLRSEDTAVYYCGRDAGLEYYALDYWGQGTLVT | |
| | (includes Fc | VSSASTKGPSVFPLAPSSKSTSGGTAALGCLVKDYFPEPVT | |
| | sequence) | VSWNSGALTSGVHTFPAVLQSSGLYSLSSVVTVPSSSLGT | |
| | | QTYICNVNHKPSNTKVDKRVEPKSCGGGGSGGGGSEVQL | |
| | | VESGGGLVQPGGSLKLSCAASGFTFNTYAMNWVRQASGK | |
| | | GLEWVGRIRSKYNNYATYYADSVKDRFTISRDDSKSTLYLQ | |
| | | MNSLKTEDTAVYYCVRHGNFGNSYVSWFAYWGQGTLVTV | |
| | | SSGGGGSGGGGSGGGGSGGGGSQAVVTQEPSLTVSPG | |
| | | GTVTLTCRSSTGAVTTSNYANWVQQKPGQAPRGLIGGTN | |
| | | KRAPWTPARFSGSLLGDKAALTLSGAQPEDEAEYFCALWY | |
| | | SNLWVFGGGTKLTVLGGGGSDKTHTCPPCPAPELLGGPS | |
| | | VFLFPPKPKDTLMISRTPEVTCVVVAVSHEDPEVKFNWYVD | |
| | | GVEVHNAKTKPREEQYASTYRVVSVLTVLHQDWLNGKEY | |
| | | KCKVSNKALAAPIEKTISKAKGQPREPQVCTLPPSREEMTK | |
| | | NQVSLSCAVKGFYPSDIAVEWESNGQPENNYKTTPPVLDS | |
| | | DGSFFLVSKLTVDKSRWQQGNVFSCSVMHEALHNHYTQK | |
| | | SLSLSPGK | |
| | First Half | EIVMTQSPATLSVSPGERATLSCRASQDVGTAVAWYQQKP | 759 |
| | Antibody | GQAPRLLIYWASTRHTGIPARFSGSGSGTEFTLTISSLQSE | |
| | Light Chain | DFAVYFCQQYANFPLYTFGQGTKLEIKRTVAAPSVFIFPPS | |
| | | DEQLKSGTASVVCLLNNFYPREAKVQWKVDNALQSGNSQ | |
| | | ESVTEQDSKDSTYSLSSTLTLSKADYEKHKVYACEVTHQG | |
| | | LSSPVTKSFNRGEC | |
| | Second Half | DKTHTCPPCPAPELLGGPSVFLFPPKPKDTLMISRTPEVTC | 1099 |
| | Antibody | VVVAVSHEDPEVKFNWYVDGVEVHNAKTKPREEQYASTY | |
| | (includes Fc | RVVSVLTVLHQDWLNGKEYKCKVSNKALAAPIEKTISKAKG | |
| | sequence) | QPREPQVYTLPPCREEMTKNQVSLWCLVKGFYPSDIAVE | |
| | | WESNGQPENNYKTTPPVLDSDGSFFLYSKLTVDKSRWQQ | |
| | | GNVFSCSVMHEALHNHYTQKSLSLSPGK | |
| CD3hi | First Half | QVQLQQSGPGLVKPSQTLSLTCAISGDSVSSNSAAWSWIR | 1100 |
| TSP1C | Antibody | QSPGRGLEWLGRIYYRSKWYNDYAVSVKSRITINPDTSKN | |
| (H variant) | Heavy Chain | QFSLQLNSVTPEDTAVYYCARLDHRYHEDTVYPGMDVWG | |
| | (includes Fc | QGTLVTVSSASTKGPSVFPLAPSSKSTSGGTAALGCLVKD | |
| | sequence) | YFPEPVTVSWNSGALTSGVHTFPAVLQSSGLYSLSSVVTV | |
| | | PSSSLGTQTYICNVNHKPSNTKVDKRVEPKSCGGGGSGG | |
| | | GGSEVQLVESGGGLVQPGGSLKLSCAASGFTFNTYAMNW | |
| | | VRQASGKGLEWVGRIRSKYNNYATYYADSVKDRFTISRDD | |
| | | SKSTLYLQMNSLKTEDTAVYYCVRHGNFGNSYVSWFAYW | |
| | | GQGTLVTVSSGGGGSGGGGSGGGGSGGGGSQAVVTQE | |
| | | PSLTVSPGGTVTLTCRSSTGAVTTSNYANWVQQKPGQAP | |
| | | RGLIGGTNKRAPWTPARFSGSLLGDKAALTLSGAQPEDEA | |
| | | EYFCALWYSNLWVFGGGTKLTVLGGGGSDKTHTCPPCPA | |
| | | PELLGGPSVFLFPPKPKDTLMISRTPEVTCVVVAVSHEDPE | |
| | | VKFNWYVDGVEVHNAKTKPREEQYASTYRVVSVLTVLHQ | |
| | | DWLNGKEYKCKVSNKALAAPIEKTISKAKGQPREPQVCTLP | |
| | | PSREEMTKNQVSLSCAVKGFYPSDIAVEWESNGQPENNY | |
| | | KTTPPVLDSDGSFFLVSKLTVDKSRWQQGNVFSCSVMHE | |
| | | ALHNHYTQKSLSLSPGK | |
| | First Half | DIELTQPPSVSVAPGQTARISCSGDNLPAYTVTWYQQKPG | 1101 |
| | Antibody | QAPVLVIYDDSDRPSGIPERFSGSNSGNTATLTISGTQAED | |
| | Light Chain | EADYYCASWDPSSGVVFGGGTKLTVLGQPKAAPSVTLFPP | |
| | | SSEELQANKATLVCLISDFYPGAVTVAWKADSSPVKAGVET | |
| | | TTPSKQSNNKYAASSYLSLTPEQWKSHRSYSCQVTHEGST | |
| | | VEKTVAPTECS | |
| | Second Half | SQQIYGVVYGNVTFHVPSNVPLKEVLWKKQKDKVAELENS | 1086 |
| | Antibody | EFRAFSSFKNRVYLDTVSGSLTIYNLTSSDEDEYEMESPNIT | |
| | (includes Fc | DTMKFFLYVLESGGGGSDKTHTCPPCPAPELLGGPSVFLF | |
| | sequence) | PPKPKDTLMISRTPEVTCVVVAVSHEDPEVKFNWYVDGVE | |
| | | VHNAKTKPREEQYASTYRVVSVLTVLHQDWLNGKEYKCKV | |
| | | SNKALAAPIEKTISKAKGQPREPQVYTLPPCREEMTKNQVS | |
| | | LWCLVKGFYPSDIAVEWESNGQPENNYKTTPPVLDSDGSF | |
| | | FLYSKLTVDKSRWQQGNVFSCSVMHEALHNHYTQKSLSLS | |
| | | PGK | |

TABLE 19D
Nucleotide sequences (H variants)

| | | | SEQ |
|---|---|---|---|
| Construct | Chain | | ID |
| Name | Description | Amino Acid Sequence | NO: |
| CD3hi | First Half | ATGCCACTGCTGCTTCTACTGCCACTCCTGTGGGCAGGA | 1089 |
| TSP1 | Antibody | GCACTGGCCCAAGTGCAACTGGTGCAGTCCGGTGCCGA | |
| (H variant) | Heavy Chain | AGTGAAGAAGCCCGGTGCCTCTGTGAAGGTGTCCTGCAA | |
| | (includes | GGCGTCGGGATACACGTTCACCACTTACTGGATTCAGTG | |
| | signal | GGTCAGACAGGCCCCGGGACAGAGACTGGAGTGGATGG | |
| | peptide | GAGCCGTGTACCCCGGAGATGCAGACACTCGCTACACCC | |
| | sequence) | AGAAGTTCCAGGGCCGCGTGACTTTGACCGCCGACAGAA | |
| | | GCGCCAGCACCGCCTACATGGAGCTTTCATCCCTCCGGA | |
| | | GCGAGGATACTGCCGTATACTATTGCGGAAGGGATGCCG | |
| | | GCCTGGAATACTATGCCCTCGACTACTGGGGACAGGGGA | |
| | | CCCTCGTGACTGTGTCCAGCGCGAGCACCAAGGGCCCC | |
| | | AGCGTGTTCCCGCTGGCCCCATCATCCAAGTCCACCTCG | |
| | | GGAGGGACTGCTGCGCTCGGTTGCCTTGTGAAGGACTAC | |
| | | TTCCCCGAGCCCGTGACTGTGTCGTGGAACAGCGGGGC | |
| | | TCTGACCAGCGGGGTTCACACCTTTCCCGCCGTGCTGCA | |
| | | GTCCTCGGGACTCTACAGCCTGTCCTCCGTGGTCACGGT | |
| | | CCCGTCGTCGTCGCTGGGGACCCAGACCTACATTTGCAA | |
| | | CGTGAACCACAAACCCTCCAACACAAAAGTGGACAAAAG | |
| | | GGTGGAACCTAAGTCCTGTGGAGGGGGTGGATCAGGCG | |
| | | GAGGAGGATCGGAAGTCCAGCTCGTCGAATCAGGGGGA | |
| | | GGGCTTGTGCAACCAGGAGGCTCCCTCAAGCTGTCTTGC | |
| | | GCAGCGTCCGGTTTCACTTTCAACACTTATGCGATGAATT | |
| | | GGGTCCGCCAAGCCAGTGGGAAGGGCCTGGAGTGGGTC | |
| | | GGACGGATCAGATCCAAGTACAACAACTACGCGACATAC | |
| | | TACGCCGACTCCGTGAAGGATCGCTTCACCATCAGCCGG | |
| | | GATGACTCCAAGAGCACCTTGTACCTCCAAATGAACAGC | |
| | | CTTAAGACCGAGGACACTGCGGTGTACTACTGCGTGAGA | |
| | | CACGGCAACTTCGGAAACTCCTACGTGTCCTGGTTCGCC | |
| | | TACTGGGGACAGGGCACCCTTGTCACTGTGTCAAGCGGA | |
| | | GGCGGTGGTTCGGGTGGCGGAGGTTCCGGAGGAGGAG | |
| | | GTTCGGGCGGTGGTGGATCACAGGCCGTCGTGACTCAG | |
| | | GAACCATCCCTGACTGTGTCCCCCGGTGGAACCGTGACC | |
| | | CTCACCTGTCGCTCCTCAACCGGAGCCGTGACCACCTCC | |
| | | AACTACGCTAATTGGGTGCAGCAGAAGCCAGGACAAGCC | |
| | | CCACGGGGACTGATTGGGGGCACCAACAAGAGGGCTCC | |
| | | TTGGACCCCAGCCCGCTTCTCGGGCTCCCTGTTGGGCGA | |
| | | CAAGGCCGCTCTGACCCTGTCCGGTGCACAGCCGGAGG | |
| | | ATGAAGCCGAATACTTCTGCGCGCTGTGGTACTCCAACC | |
| | | TCTGGGTGTTCGGCGGAGGGACCAAGCTGACTGTGTTG | |
| | | GGAGGAGGGGGGAGTGACAAGACTCACACGTGTCCGCC | |
| | | TTGCCCAGCACCCGAGCTACTGGGAGGACCGAGCGTGT | |
| | | TCCTGTTTCCCCCGAAGCCGAAGGATACCCTGATGATCT | |
| | | CCCGCACTCCTGAAGTGACTTGCGTGGTGGTGGCAGTGT | |
| | | CCCACGAGGACCCGGAAGTCAAGTTTAATTGGTACGTGG | |
| | | ATGGCGTGGAGGTGCACAACGCAAAGACCAAGCCTCGC | |
| | | GAGGAGCAGTACGCCAGCACCTACCGGGTGGTGTCCGT | |
| | | CCTGACGGTGCTGCACCAGGACTGGCTGAACGGGAAGG | |
| | | AGTACAAGTGCAAAGTGTCAAATAAGGCTTTGGCCGCCC | |
| | | CTATTGAGAAAACCATCTCAAAGGCCAAGGGCCAACCCA | |
| | | GGGAACCTCAAGTGTGCACCCTCCCACCTTCGCGAGAAG | |
| | | AGATGACCAAGAACCAGGTGTCCCTGTCCTGCGCCGTGA | |
| | | AGGGCTTCTACCCCTCCGATATCGCCGTGGAGTGGGAAT | |
| | | CTAACGGACAGCCGGAGAACAACTACAAGACCACTCCGC | |
| | | CGGTGCTGGACAGCGACGGCTCCTTCTTCCTCGTGTCGA | |
| | | AACTGACCGTGGACAAGTCACGGTGGCAGCAGGGCAAT | |
| | | GTGTTCAGCTGCTCAGTCATGCATGAGGCCCTCCACAAC | |
| | | CACTACACTCAGAAGTCCCTGTCGCTTTCCCCCGGAAAA | |
| | First Half | ATGTCGGTCCTGACCCAAGTGCTGGCCCTCCTTCTCCTG | 1090 |
| | Antibody | TGGCTGACCGGGACCAGATGCGAAATCGTCATGACTCAG | |
| | Light Chain | AGCCCGGCAACCCTGTCCGTGAGCCCTGGAGAACGGGC | |
| | (includes | CACTCTGAGCTGTCGGGCGTCACAGGACGTGGGAACTG | |
| | signal | CCGTGGCCTGGTATCAGCAGAAGCCGGGACAGGCTCCT | |
| | peptide | AGGTTGCTCATCTACTGGGCGTCCACTCGCCACACCGGA | |
| | sequence) | ATCCCAGCCCGCTTCTCCGGCTCGGGTTCTGGCACCGAG | |
| | | TTCACCCTGACCATTTCCTCCCTCCAATCCGAGGATTTCG | |
| | | CCGTGTACTTCTGCCAACAATACGCCAACTTCCCCCTGTA | |
| | | CACATTTGGCCAGGGGACCAAGCTGGAGATTAAGCGTAC | |
| | | GGTGGCCGCTCCCAGCGTGTTCATCTTCCCCCCCAGCGA | |
| | | CGAGCAGCTGAAGAGGGGCACCGCCAGCGTGGTGTGCC | |
| | | TGCTGAACAACTTCTACCCCCGGGAGGCCAAGGTGCAGT | |
| | | GGAAGGTGGACAACGCCCTGCAGAGCGGCAACAGCCAG | |
| | | GAGAGCGTCACCGAGCAGGACAGCAAGGACTCCACCTA | |
| | | CAGCCTGAGCAGCACCCTGACCCTGAGCAAGGCCGACT | |
| | | ACGAGAAGCATAAGGTGTACGCCTGCGAGGTGACCCACC | |
| | | AGGGCCTGTCCAGCCCCGTGACCAAGAGCTTCAACAGG | |
| | | GGCGAGTGC | |
| | Second Half | ATGCCTCTGCTGCTCCTGCTGCCTCTGCTCTGGGGGGGA | 1091 |
| | Antibody | GCTTTGGCATCACAGCAAATCTACGGCGTGGTGTACGGC | |
| | (includes | AACGTGACCTTCCATGTCCCCTCGAATGTGCCGCTGAAG | |
| | signal | GAAGTGCTCTGGAAGAAGCAGAAGGACAAGGTCGCGGA | |
| | peptide | ACTGGAAAACTCCGAGTTTCGCGCCTTCTCCTCCTTCAAA | |
| | sequence) | AACCGGGTGTACCTGGACACCGTGTCCGGGAGCCTTACT | |
| | | ATCTACAACCTGACCTCCTCGGACGAGGATGAGTATGAG | |
| | | ATGGAGAGCCCAAACATTACCGACACCATGAAGTTCTTCC | |
| | | TCTACGTGCTGGAATCGGGTGGAGGGGGAAGCGATAAG | |
| | | ACTCACACGTGTCCACCTTGTCCCGCACCCGAACTCCTG | |
| | | GGGGGACCTTCCGTGTTTCTCTTCCCCCCTAAACCGAAG | |
| | | GACACCTTGATGATCTCCCGCACTCCTGAAGTGACCTGT | |
| | | GTGGTGGTGGCCGTGTCCCACGAGGACCCAGAAGTCAA | |
| | | GTTTAATTGGTACGTGGACGGAGTCGAGGTGCACAACGC | |
| | | GAAAACCAAACCGGGGGAGGAGCAGTACGCCTCCACCTA | |
| | | CCGGGTGGTGTCCGTCCTCACTGTGCTGCACCAGGACTG | |
| | | GCTCAACGGAAAGGAGTACAAGTGCAAAGTGTCCAACAA | |
| | | AGCCTTGGGGGCCCCAATCGAAAAGACGATCTCCAAGGC | |
| | | CAAGGGACAGCCGCGCGAACCTCAAGTCTACACCCTGCC | |
| | | TCCTTGCCGCGAGGAAATGACCAAGAACCAGGTGTCACT | |
| | | GTGGTGTCTGGTCAAGGGATTCTACCCTTCCGATATCGC | |
| | | AGTGGAGTGGGAAAGCAACGGCCAACCAGAGAACAACTA | |
| | | TAAGACCACACCCCCGGTGCTCGATTCCGACGGCTCATT | |
| | | CTTCCTGTACTCCAAGCTGACCGTGGACAAGTCAGGGTG | |
| | | GCAGCAGGGGAACGTGTTCAGCTGCTCCGTGATGCATGA | |
| | | AGCCCTGCACAATCATTACACTCAGAAGTCCCTGTCGCT | |
| | | GAGCCCCGGAAAA | |
| CD3med | First Half | ATGCCACTGCTGCTTCTACTGCCACTCCTGTGGGCAGGA | 1092 |
| TSP1 | Antibody | GCACTGGCCCAAGTGGAACTGGTGGAGTCCGGTGCCGA | |
| (H variant) | Heavy Chain | AGTGAAGAAGCCCGGTGCCTCTGTGAAGGTGTCCTGCAA | |
| | (includes | GGCGTCGGGATACACGTTCACCACTTACTGGATTCAGTG | |
| | signal | GGTCAGACAGGCCCCGGGACAGAGACTGGAGTGGATGG | |
| | peptide | GAGCCGTGTACCCCGGAGATGCAGACACTCGCTACACCC | |
| | sequence) | AGAAGTTCCAGGGCCGCGTGACTTTGACCGCCGACAGAA | |
| | | GCGCCAGCACCGCCTACATGGAGCTTTCATCCCTCCGGA | |
| | | GCGAGGATACTGCCGTATACTATTGGGGAAGGGATGCCG | |
| | | GCCTGGAATACTATGCCCTCGACTACTGGGGACAGGGGA | |
| | | CCCTCGTGACTGTGTCCAGCGCGAGCACCAAGGGCCCG | |
| | | AGCGTGTTCCCATTGGCCCCGTCGTCAAAGTCCACCTCT | |
| | | GGCGGAACTGCGGCTCTGGGATGTCTCGTGAAGGACTA | |
| | | CTTTCCGGAACCCGTGACTGTGTCCTGGAACAGCGGCGC | |
| | | CCTCACTTCCGGCGTGCATACCTTCCCTGCCGTGCTGCA | |
| | | GTCCTCCGGCCTGTACAGCCTCAGCAGCGTCGTGACTGT | |
| | | GCCCTCCTCGTCCTTGGGCACCCAGACCTACATCTGCAA | |
| | | CGTCAACCACAAGCCCTCGAACACCAAAGTGGATAAGCG | |
| | | GGTGGAACCCAAGAGCTGTGGAGGGGGTGGCTCAGGAG | |
| | | GAGGGGGATCCGAAGTGCAGCTCGTGGAGTCCGGAGGA | |
| | | GGCCTGGTGCAGCCTGGGGGATCCCTCAAGCTTAGCTG | |
| | | CGCCGCATCAGGCTTCACCTTCAACACCTAGGCCATGAA | |
| | | CTGGGTCCGCCAAGCATCCGGAAAGGGCCTGGAATGGG | |
| | | TCGGGAGAATCAGATCCAAGTACAACAACTACGCCACGT | |
| | | ACTACGCGGACTCCGTCAAGGACCGGTTCACTATTAGCC | |
| | | GGGATGACTCCAAGAATACCGCGTACCTTCAGATGAACT | |
| | | CGCTCAAAACCGAGGACACTGCCGTGTATTACTGCGTGC | |
| | | GGCACGGAAACTTCGGGAACAGTTACGTGTCCTGGTTCG | |
| | | CCCATTGGGGTCAAGGCACCCTGGTCACCGTGTCCTCGG | |
| | | GTGGTGGTGGCTCCGGTGGAGGAGGATCGGGGGGTGG | |
| | | AGGATCTGGGGGAGGCGGATCACAGGCGGTCGTGACTC | |
| | | AGGAGCCCTCCCTGACCGTGTCGCCTGGTGGCACCGTG | |
| | | ACTCTGACTTGCGGAAGCTCAACAGGCGCCGTGACCTCC | |
| | | TCGAACTACGCCAACTGGGTGCAACAGAAGCCGGGACAA | |
| | | GCCCCTAGGGGACTGATCGGGGGGACCAACAAGCGCGC | |
| | | TCCGTGGACTCCCGCGAGGTTCTCCGGAAGCCTCCTGG | |
| | | GAGGGAAGGCAGCCCTGACCCTGTCCGGAGCTCAGCCA | |
| | | GAAGATGAGGCCGAGTACTATTGCGCCCTGTGGTACTCG | |
| | | AATCTGTGGGTGTTTGGAGGCGGCACCAAGCTGACCGTC | |
| | | CTGGGTGGTGGCGGAAGCGACAAGACTCACACGTGTCC | |
| | | GCCTTGCCCAGCACCCGAGCTACTGGGAGGACCGAGCG | |
| | | TGTTCCTGTTTCCCCCGAAGCCGAAGGATACCCTGATGA | |
| | | TCTCCCGCACTCCTGAAGTGACTTGCGTGGTGGTGGCAG | |
| | | TGTCCCACGAGGACCCGGAAGTCAAGTTTAATTGGTACG | |
| | | TGGATGGCGTGGAGGTGCACAACGCAAAGACCAAGCCT | |
| | | CGCGAGGAGCAGTACGCCAGCACCTACCGGGTGGTGTC | |
| | | CGTCCTGACGGTGCTGCACCAGGACTGGCTGAACGGGA | |
| | | AGGAGTAGAAGTGCAAAGTGTCAAATAAGGCTTTGGCCG | |
| | | CCCCTATTGAGAAAACCATCTCAAAGGCCAAGGGCCAAC | |
| | | CCAGGGAACCTGAAGTGTGCACCCTCCCACCTTCGCGAG | |
| | | AAGAGATGACCAAGAACCAGGTGTCCCTGTCCTGCGCCG | |
| | | TGAAGGGCTTCTACCCCTCCGATATCGCCGTGGAGTGGG | |
| | | AATCTAACGGACAGCCGGAGAACAACTACAAGACCACTC | |
| | | CGCCGGTGCTGGACAGCGACGGCTCCTTCTTCCTCGTGT | |
| | | CGAAACTGACCGTGGACAAGTCACGGTGGCAGCAGGGC | |
| | | AATGTGTTCAGCTGCTCAGTCATGCATGAGGCCCTCCAC | |
| | | AACCACTACACTCAGAAGTCCCTGTCGCTTTCCCCCGGA | |
| | | AAA | |
| | First Half | GAAATCGTCATGACTCAGAGCCCGGCAACCCTGTCCGTG | 1093 |
| | Antibody | AGCCCTGGAGAACGGGCCACTCTGAGCTGTCGGGGGTC | |
| | Light Chain | ACAGGACGTGGGAACTGCCGTGGCCTGGTATCAGCAGA | |
| | (includes | AGCCGGGACAGGCTCCTAGGTTGCTCATCTACTGGGCGT | |
| | signal | CCACTCGCCACACCGGAATCCCAGCCCGCTTCTCCGGCT | |
| | peptide | CGGGTTCTGGCACCGAGTTCACCCTGACCATTTCCTCCC | |
| | sequence) | TCCAATCCGAGGATTTCGCCGTGTACTTCTGCCAACAATA | |
| | | CGCCAACTTCCCCCTGTACACATTTGGCCAGGGGACCAA | |
| | | GCTGGAGATTAAGCGTACGGTGGCCGCTCCCAGCGTGTT | |
| | | CATCTTCCCCCCCAGCGACGAGCAGCTGAAGAGCGGCA | |
| | | CCGCCAGCGTGGTGTGCCTGCTGAACAACTTCTACCCCC | |
| | | GGGAGGCCAAGGTGCAGTGGAAGGTGGACAACGCCCTG | |
| | | CAGAGCGGCAACAGCCAGGAGAGCGTCACCGAGCAGGA | |
| | | CAGCAAGGACTCCACCTACAGCCTGAGCAGCACCCTGAC | |
| | | CCTGAGCAAGGCCGACTACGAGAAGCATAAGGTGTACGC | |
| | | CTGCGAGGTGACCCACCAGGGCCTGTCCAGCCCCGTGA | |
| | | CCAAGAGCTTCAACAGGGGCGAGTGC | |
| | Second Half | ATGCCTCTGCTGCTCCTGCTGCCTCTGCTCTGGGCCGGA | 1091 |
| | Antibody | GCTTTGGCATCACAGCAAATCTACGGCGTGGTGTACGGC | |
| | (includes | AACGTGACCTTCCATGTCCCCTCCAATGTGCCGCTGAAG | |
| | signal | GAAGTGCTCTGGAAGAAGCAGAAGGACAAGGTCGCGGA | |
| | peptide | ACTGGAAAACTCCGAGTTTCGCGCCTTCTCCTCCTTCAAA | |
| | sequence) | AACCGGGTGTACCTGGACACCGTGTCCGGGAGCCTTACT | |
| | | ATCTACAACCTGACCTCCTCGGACGAGGATGAGTATGAG | |
| | | ATGGAGAGCCCAAACATTACCGACACCATGAAGTTCTTCC | |
| | | TCTACGTGCTGGAATCGGGTGGAGGCGGAAGCGATAAG | |
| | | ACTCACACGTGTCCACCTTGTCCCGCACCCGAACTCCTG | |
| | | GGGGGACCTTCCGTGTTTCTCTTCCCCCCTAAACCGAAG | |
| | | GÅCACCTTGATGATCTCCCGCACTCCTGAAGTGACCTGT | |
| | | GTGGTGGTGGCCGTGTCCCACGAGGACCCAGAAGTCAA | |
| | | GTTTAATTGGTACGTGGAGGGAGTCGAGGTGCACAACGC | |
| | | GAAAACCAAACCGGGGGAGGAGCAGTACGCCTCCACCTA | |
| | | CCGGGTGGTGTCCGTCCTCACTGTGCTGCACCAGGACTG | |
| | | GCTCAACGGAAAGGAGTAGAAGTGCAAAGTGTCCAAGAA | |
| | | AGCCTTGGCGGCCCCAATCGAAAAGACGATCTCCAAGGC | |
| | | CAAGGGAGAGCCGCGCGAACCTCAAGTCTACACCCTGCC | |
| | | TCCTTGCCGCGAGGAAATGACCAAGAACCAGGTGTCACT | |
| | | GTGGTGTCTGGTCAAGGGATTCTACCCTTCCGATATCGC | |
| | | AGTGGAGTGGGAAAGCAACGGCCAACCAGAGAACAACTA | |
| | | TAAGACCACACCCCCGGTGCTCGATTCCGACGGCTCATT | |
| | | CTTCCTGTACTCCAAGCTGACCGTGGACAAGTCACGGTG | |
| | | GCAGCAGGGGAACGTGTTCAGCTGCTCCGTGATGCATGA | |
| | | AGCCCTGCACAATCATTACACTCAGAAGTCCCTGTCGCT | |
| | | GAGCCCCGGAAAA | |
| CD3hi | First Half | ATGCCACTGCTGCTTCTACTGCCACTCCTGTGGGCAGGA | 1089 |
| BSP1 | Antibody | GCACTGGCCCAAGTGCAACTGGTGCAGTCCGGTGCCGA | |
| (H variant) | Heavy Chain | AGTGAAGAAGCCCGGTGCCTCTGTGAAGGTGTCCTGCAA | |
| | (includes | GGCGTCGGGATACACGTTCACCACTTACTGGATTCAGTG | |
| | signal | GGTCAGACAGGCCCCGGGACAGAGACTGGAGTGGATGG | |
| | peptide | GAGCCGTGTACCCCGGAGATGCAGACACTCGCTACACCC | |
| | sequence) | AGAAGTTCCAGGGCCGCGTGACTTTGACCGCCGACAGAA | |
| | | GCGCCAGCACCGCCTACATGGAGCTTTCATCCCTCCGGA | |
| | | GCGAGGATACTGCCGTATACTATTGCGGAAGGGATGCCG | |
| | | GCCTGGAATACTATGCCCTCGACTACTGGGGACAGGGGA | |
| | | CCCTCGTGACTGTGTCCAGCGCGAGCACCAAGGGCCCC | |
| | | AGCGTGTTCCCGCTGGCCCCATCATCCAAGTCCACCTCG | |
| | | GGAGGGACTGCTGCGCTCGGTTGCCTTGTGAAGGACTAC | |
| | | TTCCCCGAGCCCGTGACTGTGTCGTGGAACAGCGGGGC | |
| | | TCTGACCAGCGGGGTTCACACCTTTCCCGCCGTGCTGCA | |
| | | GTCCTCGGGACTCTACAGCCTGTCCTCCGTGGTCACGGT | |
| | | CCCGTCGTCGTCGCTGGGGACCCAGACCTACATTTGCAA | |
| | | CGTGAACCACAAACCCTCCAACACAAAAGTGGACAAAAG | |
| | | GGTGGAACCTAAGTCCTGTGGAGGGGGTGGATCAGGCG | |
| | | GAGGAGGATCGGAAGTCCAGCTCGTCGAATCAGGGGGA | |
| | | GGGCTTGTGCAACCAGGAGGCTCCCTCAAGCTGTCTTGC | |
| | | GCAGCGTCCGGTTTCACTTTCAACACTTATGCGATGAATT | |
| | | GGGTCCGCCAAGCCAGTGGGAAGGGCCTGGAGTGGGTC | |
| | | GGACGGATCAGATCCAAGTACAACAACTACGCGACATAC | |
| | | TACGCCGACTCCGTGAAGGATCGCTTCACCATCAGCCGG | |
| | | GATGACTCCAAGAGCACCTTGTACCTCCAAATGAACAGC | |
| | | CTTAAGACCGAGGACACTGCGGTGTACTACTGCGTGAGA | |
| | | CACGGCAACTTCGGAAACTCCTACGTGTCCTGGTTCGCC | |
| | | TACTGGGGACAGGGCACCCTTGTCACTGTGTCAAGCGGA | |
| | | GGCGGTGGTTCGGGTGGCGGAGGTTCCGGAGGAGGAG | |
| | | GTTCGGGCGGTGGTGGATCACAGGCCGTCGTGACTCAG | |
| | | GAACCATCCCTGACTGTGTCCCCCGGTGGAACCGTGACC | |
| | | CTCACCTGTCGCTCCTCAACCGGAGCCGTGACCACCTCC | |
| | | AACTACGCTAATTGGGTGCAGCAGAAGCCAGGACAAGCC | |
| | | CCACGGGGACTGATTGGGGGCACCAACAAGAGGGCTCC | |
| | | TTGGACCCCAGCCCGCTTCTCGGGCTCCCTGTTGGGCGA | |
| | | CAAGGCCGCTCTGACCCTGTCCGGTGCACAGCCGGAGG | |
| | | ATGAAGCCGAATACTTCTGCGCGCTGTGGTACTCCAACC | |
| | | TCTGGGTGTTCGGCGGAGGGACCAAGCTGACTGTGTTG | |
| | | GGAGGAGGGGGGAGTGACAAGACTCACACGTGTCCGCC | |
| | | TTGCCCAGCACCCGAGCTACTGGGAGGACCGAGCGTGT | |
| | | TCCTGTTTCCCCCGAAGCCGAAGGATACCCTGATGATCT | |
| | | CCCGCACTCCTGAAGTGACTTGCGTGGTGGTGGCAGTGT | |
| | | CCCACGAGGACCCGGAAGTCAAGTTTAATTGGTACGTGG | |
| | | ATGGCGTGGAGGTGCACAACGCAAAGACCAAGCCTCGC | |
| | | GAGGAGCAGTACGCCAGCACCTACCGGGTGGTGTCCGT | |
| | | CCTGACGGTGCTGCACCAGGACTGGCTGAACGGGAAGG | |
| | | AGTACAAGTGCAAAGTGTCAAATAAGGCTTTGGCCGCCC | |
| | | CTATTGAGAAAACCATCTCAAAGGCCAAGGGCCAACCCA | |
| | | GGGAACCTCAAGTGTGCACCCTCCCACCTTCGCGAGAAG | |
| | | AGATGACCAAGAACCAGGTGTCCCTGTCCTGCGCCGTGA | |
| | | AGGGCTTCTACCCCTCCGATATCGCCGTGGAGTGGGAAT | |
| | | CTAACGGACAGCCGGAGAACAACTACAAGACCACTCCGC | |
| | | CGGTGCTGGACAGCGACGGCTCCTTCTTCCTCGTGTCGA | |
| | | AACTGACCGTGGACAAGTCACGGTGGCAGCAGGGCAAT | |
| | | GTGTTCAGCTGCTCAGTCATGCATGAGGCCCTCCACAAC | |
| | | CACTACACTCAGAAGTCCCTGTCGCTTTCCCCCGGAAAA | |
| | First Half | ATGTCGGTCCTGACCCAAGTGCTGGCCCTCCTTCTCCTG | 1090 |
| | Antibody | TGGCTGACCGGGACCAGATGCGAAATCGTCATGACTCAG | |
| | Light Chain | AGCCCGGCAACCCTGTCCGTGAGCCCTGGAGAACGGGC | |
| | (includes | CACTCTGAGCTGTCGGGCGTCACAGGACGTGGGAACTG | |
| | signal | CCGTGGCCTGGTATCAGCAGAAGCCGGGACAGGCTCCT | |
| | peptide | AGGTTGCTCATCTACTGGGCGTCCACTCGCCACACCGGA | |
| | sequence) | ATCCCAGCCCGCTTCTCCGGCTCGGGTTCTGGCACCGAG | |
| | | TTCACCCTGACCATTTCCTCCCTCCAATCCGAGGATTTCG | |
| | | CCGTGTACTTCTGCCAACAATACGCCAACTTCCCCCTGTA | |
| | | CACATTTGGCCAGGGGACCAAGCTGGAGATTAAGCGTAC | |
| | | GGTGGCCGCTCCCAGCGTGTTCATCTTCCCCCCCAGCGA | |
| | | CGAGCAGCTGAAGAGCGGCACCGCCAGCGTGGTGTGCC | |
| | | TGCTGAACAACTTCTACCCCCGGGAGGCCAAGGTGCAGT | |
| | | GGAAGGTGGACAACGCCCTGCAGAGCGGCAACAGCCAG | |
| | | GAGAGCGTCACCGAGCAGGACAGCAAGGACTCCACCTA | |
| | | CAGCCTGAGCAGCACCCTGACCCTGAGCAAGGCCGACT | |
| | | ACGAGAAGCATAAGGTGTACGCCTGCGAGGTGACCCACC | |
| | | AGGGCCTGTCCAGCCCCGTGACCAAGAGCTTCAACAGG | |
| | | GGCGAGTGC | |
| | Second Half | ATGCCTCTGCTGCTCCTGCTGCCTCTGCTCTGGGCCGGA | 1103 |
| | Antibody | GCTTTGGCAGATAAGACTCACACGTGTCCACCTTGTCCC | |
| | (includes | GCACCCGAACTCCTGGGGGGACCTTCCGTGTTTCTCTTC | |
| | signal | CCCCCTAAACCGAAGGACACCTTGATGATCTCCCGCACT | |
| | peptide | CCTGAAGTGACCTGTGTGGTGGTGGCCGTGTCCCACGA | |
| | sequence) | GGACCCAGAAGTCAAGTTTAATTGGTACGTGGACGGAGT | |
| | | CGAGGTGCACAACGCGAAAACCAAACCGCGGGAGGAGC | |
| | | AGTACGCCTCCACCTACCGGGTGGTGTCCGTCCTCACTG | |
| | | TGCTGCACCAGGACTGGCTCAACGGAAAGGAGTACAAGT | |
| | | GCAAAGTGTCCAACAAAGCCTTGGCGGCCCCAATCGAAA | |
| | | AGACGATCTCCAAGGCCAAGGGACAGCCGCGCGAACCT | |
| | | CAAGTCTACACCCTGCCTCCTTGCCGCGAGGAAATGACC | |
| | | AAGAACCAGGTGTCACTGTGGTGTCTGGTCAAGGGATTC | |
| | | TACCCTTCCGATATCGCAGTGGAGTGGGAAAGCAACGGC | |
| | | CAACCAGAGAACAACTATAAGACCACACCCCCGGTGCTC | |
| | | GATTCCGACGGCTCATTCTTCCTGTACTCCAAGCTGACC | |
| | | GTGGACAAGTCACGGTGGCAGCAGGGGAACGTGTTCAG | |
| | | CTGCTCCGTGATGCATGAAGCCCTGCACAATCATTACACT | |
| | | CAGAAGTCCCTGTCGCTGAGCCCCGGAAAA | |
| CD3hi | First Half | ATGCCTCTGCTGCTCCTGTTGCCCCTGCTGTGGGCTGGA | 1104 |
| TSP1C | Antibody | GCCTTGGCCCAAGTGCAGCTTCAGCAGTCGGGACCCGG | |
| (H variant) | Heavy Chain | ACTCGTGAAGCCGTCGCAGACGCTGTCCCTGACCTGTGC | |
| | (includes | CATTAGCGGCGACTCCGTGAGCAGCAACAGCGCAGCCT | |
| | signal | GGTCCTGGATTCGGCAGTCACCTGGTCGGGGGCTTGAAT | |
| | peptide | GGCTGGGACGGATCTACTACCGCTCGAAATGGTATAACG | |
| | sequence) | ACTACGCCGTGTCTGTGAAGTCCAGGATCACCATCAACC | |
| | | CGGACACCTCCAAGAATCAGTTCTCCCTCCAACTGAACTC | |
| | | AGTGACCCCAGAGGACACCGCCGTCTACTACTGCGCGA | |
| | | GACTGGATCACCGCTACCATGAAGATACCGTGTACCCGG | |
| | | GGATGGACGTCTGGGGCCAGGGTACTCTCGTCACTGTGT | |
| | | CCTCCGCGTCCACTAAGGGCCCCAGCGTGTTCCCGCTG | |
| | | GCCCCATCATCCAAGTCCACCTCGGGAGGGACTGCTGC | |
| | | GCTCGGTTGCCTTGTGAAGGACTACTTCCCCGAGCCCGT | |
| | | GACTGTGTCGTGGAACAGCGGGGCTCTGACCAGCGGGG | |
| | | TTCACACCTTTCCCGCCGTGCTGCAGTCCTCGGGACTCT | |
| | | ACAGCCTGTCCTCCGTGGTCACGGTCCCGTCGTCGTCGC | |
| | | TGGGGACCCAGACCTACATTTGCAACGTGAACCACAAAC | |
| | | CCTCCAACACAAAAGTGGACAAAAGGGTGGAACCTAAGT | |
| | | CCTGTGGAGGGGGTGGATCAGGCGGAGGAGGATCGGAA | |
| | | GTCCAGCTCGTCGAATCAGGGGGAGGGCTTGTGCAACC | |
| | | AGGAGGCTCCCTCAAGCTGTCTTGCGCAGCGTCCGGTTT | |
| | | CACTTTCAACACTTATGCGATGAATTGGGTCCGCCAAGCC | |
| | | AGTGGGAAGGGCCTGGAGTGGGTCGGACGGATCAGATC | |
| | | CAAGTACAACAACTACGCGACATACTACGCCGACTCCGT | |
| | | GAAGGATCGCTTCACCATCAGCCGGGATGACTCCAAGAG | |
| | | CACCTTGTACCTCCAAATGAACAGCCTTAAGACCGAGGA | |
| | | CACTGCGGTGTACTACTGCGTGAGACACGGCAACTTCGG | |
| | | AAACTCCTACGTGTCCTGGTTCGCCTACTGGGGACAGGG | |
| | | CACCCTTGTCACTGTGTCAAGCGGAGGCGGTGGTTCGG | |
| | | GTGGCGGAGGTTCCGGAGGAGGAGGTTCGGGCGGTGGT | |
| | | GGATCACAGGCCGTCGTGACTCAGGAACCATCCCTGACT | |
| | | GTGTCCCCCGGTGGAACCGTGACCCTCACCTGTCGCTCC | |
| | | TCAACCGGAGCCGTGACCACCTCCAACTACGCTAATTGG | |
| | | GTGCAGCAGAAGCCAGGACAAGCCCCACGGGGACTGAT | |
| | | TGGGGGCACCAACAAGAGGGCTCCTTGGACCCCAGCCC | |
| | | GCTTCTCGGGCTCCCTGTTGGGCGACAAGGCCGCTCTGA | |
| | | CCCTGTCCGGTGCACAGCCGGAGGATGAAGCCGAATACT | |
| | | TCTGCGCGCTGTGGTACTCCAACCTCTGGGTGTTCGGCG | |
| | | GAGGGACCAAGCTGACTGTGTTGGGAGGAGGGGGGAGT | |
| | | GACAAGACTCACACGTGTCCGCCTTGCCCAGCACCCGAG | |
| | | CTACTGGGAGGACCGAGCGTGTTCCTGTTTCCCCCGAAG | |
| | | CCGAAGGATACCCTGATGATCTCCCGCACTCCTGAAGTG | |
| | | ACTTGCGTGGTGGTGGCAGTGTCCCACGAGGACCCGGA | |
| | | AGTCAAGTTTAATTGGTACGTGGATGGCGTGGAGGTGCA | |
| | | CAACGCAAAGACCAAGCCTCGCGAGGAGCAGTACGCCA | |
| | | GCACCTACCGGGTGGTGTCCGTCCTGACGGTGCTGCAC | |
| | | CAGGACTGGCTGAACGGGAAGGAGTACAAGTGCAAAGT | |
| | | GTCAAATAAGGCTTTGGCCGCCCCTATTGAGAAAACCATC | |
| | | TCAAAGGCCAAGGGCCAACCCAGGGAACCTCAAGTGTGC | |
| | | ACCCTCCCACCTTCGCGAGAAGAGATGACCAAGAACCAG | |
| | | GTGTCCCTGTCCTGCGCCGTGAAGGGCTTCTACCCCTCC | |
| | | GATATCGCCGTGGAGTGGGAATCTAACGGACAGCCGGA | |
| | | GAACAACTACAAGACCACTCCGCCGGTGCTGGACAGCGA | |
| | | CGGCTCCTTCTTCCTCGTGTCGAAACTGACCGTGGACAA | |
| | | GTCACGGTGGCAGCAGGGCAATGTGTTCAGCTGCTCAGT | |
| | | CATGCATGAGGCCCTCCACAACCACTACACTCAGAAGTC | |
| | | CCTGTCGCTTTCCCCCGGAAAA | |
| | First Half | ATGTCCGTGCTGACCCAAGTCTTGGCGCTGCTGCTGCTG | 1105 |
| | Antibody | TGGCTCACTGGCACCCGCTGTGACATTGAACTGACCCAG | |
| | Light Chain | CCGCCTTCAGTGTCCGTGGCACCCGGACAGACCGCGAG | |
| | (includes | GATTAGCTGCTCCGGGGACAACCTCCCGGCCTACACTGT | |
| | signal | GACCTGGTATCAGCAGAAGCCCGGACAAGCCCCTGTGCT | |
| | peptide | TGTCATCTACGACGACTCGGATCGGCCAAGCGGCATCCC | |
| | sequence) | CGAGAGATTCTCCGGCTCGAACAGCGGGAACACCGCCA | |
| | | CGCTCACTATCTCGGGAACCCAGGCCGAAGATGAGGCTG | |
| | | ACTACTACTGCGCCTCATGGGATCCGTCCTCCGGAGTGG | |
| | | TGTTCGGTGGCGGAACTAAGCTGACCGTGCTGGGTCAGC | |
| | | CTAAGGCGGCGCCCTCAGTGACCCTGTTCCCTCCGTCGT | |
| | | CTGAAGAACTCCAGGCCAACAAGGCCACCCTCGTGTGCC | |
| | | TGATTTCGGACTTCTACCCGGGAGCCGTCACTGTGGCCT | |
| | | GGAAGGCCGACAGCAGCCCAGTGAAGGCCGGCGTGGAA | |
| | | ACTACCACCCCGTCCAAGCAGTCCAACAATAAGTACGCA | |
| | | GCCAGCTCCTACCTGTCCCTGACCCCCGAACAATGGAAG | |
| | | TCACACAGATCCTACTCCTGTCAAGTCACCCACGAGGGC | |
| | | AGCACTGTCGAAAAGACCGTGGCACCGACTGAGTGCTCG | |
| | Second Half | ATGCCTCTGCTGCTCCTGCTGCCTCTGCTCTGGGCCGGA | 1091 |
| | Antibody | GCTTTGGCATCACAGCAAATCTACGGCGTGGTGTACGGC | |
| | (includes | AACGTGACCTTCCATGTCCCCTCCAATGTGCCGCTGAAG | |
| | signal | GAAGTGCTCTGGAAGAAGCAGAAGGACAAGGTCGCGGA | |
| | peptide | ACTGGAAAACTCCGAGTTTCGCGCCTTCTCCTCCTTCAAA | |
| | sequence) | AACCGGGTGTACCTGGACACCGTGTCCGGGAGCCTTACT | |
| | | ATCTACAACCTGACCTCCTCGGACGAGGATGAGTATGAG | |
| | | ATGGAGAGCCCAAACATTACCGACACCATGAAGTTCTTCC | |
| | | TCTACGTGCTGGAATCGGGTGGAGGCGGAAGCGATAAG | |
| | | ACTCACACGTGTCCACCTTGTCCCGCACCCGAACTCCTG | |
| | | GGGGGACCTTCCGTGTTTCTCTTCCCCCCTAAACCGAAG | |
| | | GACACCTTGATGATCTCCCGCACTCCTGAAGTGACCTGT | |
| | | GTGGTGGTGGCCGTGTCCCACGAGGACCCAGAAGTCAA | |
| | | GTTTAATTGGTACGTGGACGGAGTCGAGGTGCACAACGC | |
| | | GAAAACCAAACCGCGGGAGGAGCAGTACGCCTCCACCTA | |
| | | CCGGGTGGTGTCCGTCCTCACTGTGCTGCACCAGGACTG | |
| | | GCTCAACGGAAAGGAGTACAAGTGCAAAGTGTCCAACAA | |
| | | AGCCTTGGCGGCCCCAATCGAAAAGACGATCTCCAAGGC | |
| | | CAAGGGACAGCCGCGCGAACCTCAAGTCTACACCCTGCC | |
| | | TCCTTGCCGCGAGGAAATGACCAAGAACCAGGTGTCACT | |
| | | GTGGTGTCTGGTCAAGGGATTCTACCCTTCCGATATCGC | |
| | | AGTGGAGTGGGAAAGCAACGGCCAACCAGAGAACAACTA | |
| | | TAAGACCACACCCCCGGTGCTCGATTCCGACGGCTCATT | |
| | | CTTCCTGTACTCCAAGCTGACCGTGGACAAGTCACGGTG | |
| | | GCAGCAGGGGAACGTGTTCAGCTGCTCCGTGATGCATGA | |
| | | AGCCCTGCACAATCATTACACTCAGAAGTCCCTGTCGCT | |
| | | GAGCCCCGGAAAA | |

### 8.2. Example 2: Ability of BBMs to Elicit Redirected T-Cell Cytotoxic Activity (RTCC) Against CD19+ Target Cells

### 8.2.1. Materials and Methods

[0961] A RTCC assay with the BBMs of Example 1A was performed to measure the ability of the BBMs to elicit RTCC against CD19+ Nalm6-luc and Karpas422-luc cells. Nalm-6 is a human B cell precursor leukemia cell line and Karpas422 is a human B-cell non-hodgkin lymphoma cell line. Briefly, Nalm6 and Karpas422 cells engineered to express the firefly luciferase reporter gene were cultured in RPM 11640 culture media with 10% fetal bovine serum (FBS). 10,000 target cells with serial diluted BBMs or gH isotype antibody control (αgH-CD3hi) were seeded on 384-well flat-bottom microtiter plate. Primary human T cells were isolated from cryopreserved peripheral blood mononuclear cells (PBMCs) and expanded using anti-CD3 and anti-CD28 dynabeads (Thermo fisher, catalog #11131 D) and subsequently cryopreserved. Expanded T cells were thawed and aliquoted to the plate to achieve an effector cell (i.e., T cell) to target cell (i.e., cancer cell) ratio (E:T ratio) of 3:1. Plates were incubated in a 37° C. incubator with 5% CO2 overnight. Following the co-incubation, Bright Glo (Promega, catalog #E2620) was added to all wells and the luminescence signal was subsequently measured on an Envision (Perkin Elmer). Target cells with Bright Glo served as maximal signal. The percent RTCC of target cells was calculated using the following formula: [100−(sample/maximal signal)*100%].

### 8.2.2. Results

[0962] Results are shown in FIGS. 4A-4B. BBMs based on both NEG258 and NEG218 mediated RTCC activity against Nalm6-luc and Karpas422-luc cells whereas gH isotype antibody (control) was not active, as expected.

### 8.3. Example 3: Ability of BBMs to Elicit T-Cell Proliferation

### 8.3.1. Materials and Methods

[0963] The BBMs described in Example 1A, containing the variable regions of NEG258 and NEG218, were evaluated for their ability to induce T cell proliferation upon co-culture with CD19 expressing target cells. Briefly, Karpas422 and Nalm-6 target cells stably expressing firefly luciferase were irradiated on the day of the assay and plated at a density of 60,000 cells per well in a Costar 96 well plate (Corning, Cat #3904) in T Cell Media (TCM) [RPMI-1640 (ThermoFisher Scientific, Cat #11875-085), 10% FBS (Seradigm, Cat #1500-500), 1% L-Glutamine (Thermo Fisher Scientific, Cat #25830-081), 1% Non Essential Amino Acids (Thermo Fisher Scientific, Cat #11140-050),1% Pen/Strep (Thermo Fisher Scientific, Cat #15070063), 1% HEPES (Thermo Fisher Scientific, Cat #15630080), Sodium Pyruvate (Thermo Fisher Scientific, Cat #11360-070), 0.1% Beta-mercaptoethanol (Thermo Fisher Scientific, Cat #21985-023)]. Peripheral blood mononuclear cells (PBMCs) previously isolated from Leukopak donors (Hemacare) and cryopreserved were thawed and Pan T cells were isolated by negative selection using the Pan T cell Isolation Kit, human [Miltenyi Biotec, Cat #130-096-535] following the manufacturer's protocol. Isolated T cells were labelled with 5 μM Cell Trace Violet (CTV) (Thermo Fisher Scientific, Cat #C34557) following the manufacturer's protocol and 60,000 CTV labeled T cells were co-cultured with 60,000 target cells to achieve an E:T ratio of 1:1. A dilution series of the NEG258- and NEG218-based BBMs and control binding molecules (αgH-CD3hi) ranging from 16 pM-10,000 pM was added to cells and the plates were incubated in a 5% CO2, 37° C. incubator for 96 hrs. After incubation, the cells were harvested, treated with Human TruStain FcX (Fc Block) [Biolegend, Cat #422302] following manufacturer instructions and then stained with Fixable Viability Dye eFlour 780 (ThermoFisher Scientific, Cat #65-0865-14) by incubation at 4° C. for 30 mins. The cells were then washed twice using FACS Buffer and stained with PerCP-Cy5.5 conjugated anti-human CD3 mAb (Biolegend, Cat #317336) by incubation at 4° C. for 30 mins. The samples were then run on BD LSR Fortessa and analyzed using FlowJo to determine % proliferated CD3+ T cells based on CD3 staining and dilution of Cell Trace Violet dye.

### 8.3.2. Results

[0964] Both NEG258- and NEG218-based BBMs induced proliferation of T cells upon co-culture with two different CD19 expressing target cell lines (FIGS. 5A-5B). The T cell proliferation effect was dose-dependent, and the NEG258-based BBM showed more potent activity than the NEG218-based BBM. The control antibody did not induce any T cell proliferation indicating that CD19 target-specific engagement was required for the proliferation of T cells.

### 8.4. Example 4: Ability of TBMs to Elicit CD2 Dependent T Cell Activation

### 8.4.1. Materials & Methods

[0965] A Jurkat cell line (JNL, an immortalized human T-cell line) that stably expresses a luciferase reporter gene driven by the NFAT promoter was used to measure T cell activation. The level of CD2 expression in JNL cells was confirmed by flow cytometry (FIG. 6A). In order to generate CD2 knockout (KO) cells by CRISPR (Clustered Regularly Interspaced Short Palindromic Repeats), JNL cells were electroporated with a CD2 Cas9 ribonucleoprotein complex. CD2⁻ cells were subsequently sorted to enrich for a uniform CD2⁻ population (FIG. 6B). A JNL reporter assay with CD2⁺ and CD2⁻ JNL cells was then performed to measure bispecific or trispecific construct-dependent T cell activation. In brief, 10,000 Nalm6 or Karpas422 cells with serial diluted BBMs or TBMs of Example 1A (i.e., R variants) were seeded on 384-well flat-bottom microtiter plate. JNL cells were then added to the plate to achieve effector to target ratio of 3:1. Plates were incubated at a 37° C. incubator with 5% CO₂ for overnight. Following the co-incubation, Bright Glo (Promega, catalog #E2620) was added to all wells and the luminescence signal was subsequently measured on an Envision (Perkin Elmer).

### 8.4.2. Results

[0966] Both BBMs and TBMs induced dose-dependent increase in luminescence when incubated with CD2 WT JNL cells, and the response level was higher with TBMs (FIGS. 6C-6F). When CD2-KO JNL cells were used as effector, decreased T cell activation was observed with TBMs as compared to corresponding BBMs, suggesting that the advantage of TBMs is dependent on CD2 expression on the T cells.

### 8.5. Example 5: Binding of NEG258- and NEG218-Based TBMs to Cyno B Cells

### 8.5.1. Materials and Methods

[0967] Cynomolgus (cyno) PBMCs (iQ Biosciences #IQB-MnPB102) were depleted of CD3+ cells using MACS positive selection (Miltenyi #130-092-012). The remaining cell population was resuspended in a FACS buffer. 100,000 cells per well were plated in a V-bottom 96-well plate, and incubated on ice for one hour with TBMs of Example 1A (i.e., R variants) at 1 ug/mL. Following two washes with FACS buffer, the cells were incubated with Alexa-647 labeled anti-human Fc secondary antibody (Jackson Immuno #109-605-098) and cyno cross reactive FITC mouse anti-human CD20 antibody (BD Pharmingen #556632) for one hour on ice. Following two washes with FACS buffer, cells were resuspended in 100 μL of buffer and data was collected on a Beckman Coulter Cytoflex. Cells were analyzed using CytExper v2.3 and gated through CD20 positive population.

### 8.5.2. Results

[0968] Due to their proximal evolutionary relationship to humans, cynomolgus monkeys are the most appropriate preclinical model to analyze the therapeutic effect and potential toxicity of antibody therapeutics, and therefore it is useful for antibodies in clinical development to bind to cynomolgus homolog of their human target. As shown in FIGS. 7A-7B, both the NEG258- and NEG218 TBMs bind to cyno B cells, indicating that the CD19 binding arm recognizes cyno CD19.

### 8.6. Example 6: Ability of TBMs to Induce T Cell Activation Upon Cyno B Cells Depletion in PBMCs

### 8.6.1. Materials & Methods

[0969] An ex vivo cyno B cell depletion assay was conducted to measure the ability of NEG258-based TBMs of Example 1 to lyse CD20 positive B cells in PBMCs (peripheral blood mononuclear cells). In brief, PBMCs were isolated from cynomolgus (cyno) monkey whole blood (BiolVT) using ficoll gradient centrifugation. Isolated PBMCs and serial diluted TBMs of Example 1A (i.e., R variants) were seeded on 96-well flat-bottom microtiter plate. Plates were incubated in a 37° C. incubator with 5% CO2 overnight. After 24 h of incubation, samples were harvested and simultaneously stained for CD3 and CD20 to identify B and T cells within the PBMC population. To allow quantitative analysis of the cell population, 75,600 counting beads were added prior to the acquisition by flow cytometry. For each sample, 20,000 beads were acquired in order to determine the absolute numbers of B cells. The percent B cell depletion was determined by calculation of the ratio between the number of B cells and the number of beads. For detection of T cell activation, the cells were stained with anti-CD3, anti-CD69 and anti-CD25 (Biolegend and BD Biosciences).

### 8.6.2. Results

[0970] Both NEG258-based TBMs depleted cyno B cells (FIG. 8A) and induced activation of CD3+ T cells as evidence by upregulation of CD69 and CD25 expression (FIGS. 8C-8H). As expected, neither B cell depletion nor T cell activation occurred in the absence of added TBM. These results show both the ability of the NEG258-based TBMs induce activation of cyno T cells as well as the specificity of the activation.

### 8.7. Example 7: Re-Directed T Cell Cytotoxicity by CD19 TBMs

[0971] NEG258- and NEG218 based TBMs of Example 1A (i.e., R variants) (having CD3 ABMs with the VH and VL domains of an anti-CD3 antibody having an affinity to CD3 of 16 nM as measured by Biacore) were analyzed for their potential to induce T cell-mediated apoptosis in tumor target cells.

### 8.7.1. Materials and Methods

[0972] In one study, the TBMs were compared across multiple donor effector cells. Briefly, huCD19-expressing Nalm6 or Karpas422 target cells were engineered to overexpress firefly luciferase. Cells were harvested and resuspended in RPMI medium (Invitrogen #11875-093) with 10% FBS. 2,500 target cells per well were plated in a flat-bottom 384-well plate. Human pan T effector cells were isolated via MACS negative selection (Miltenyi Biotec #130-096-535) from two donors from cryopreserved PBMC (Cellular Technologies Limited #CTL-UP1) then added to the plate to obtain a final E:T ratio of 3:1 or 5:1. Co-cultured cells were incubated with a serial dilution of all constructs and controls. For normalization, average maximum luminescence refers to target cells co-incubated with effector cells, but without any test construct. After an incubation of 24, 48, 72 or 96 hr at 37° C., 5% CO2, OneGlo luciferase substrate (Promega #E6120) was added to the plate. Luminescence was measured on an Envision plate reader after a 10 minute incubation. Percent specific lysis was calculated using the following equation: Specific lysis (%)=(1−(sample luminescence/average maximum luminescence))*100

### 8.7.2. Results

[0973] As shown in FIGS. 9A-9P, the TBMs show cytotoxic activity against both Nalm6 target cells (FIGS. 9A-9H) and Karpas422 cells (FIGS. 9I-P) at multiple time points, E:T ratios and effector T cell donors. The NEG258-based TBM appears to be more potent than the NEG218-based TBM.

### 8.8. Example 8: Re-Directed T Cell Cytotoxicity by TBMs with Different CD3 Affinities

[0974] The NEG258-based TBMs of Example 1A (i.e., R variants) with CD3 ABMs (comprising the VH and VL domains of anti-CD3 antibodies having affinities to CD3 of 16 nM, 30 nM and 48 nM as measured by Biacore) were analyzed for their potential to induce T cell-mediated apoptosis in tumor target cells.

### 8.8.1. Materials and Methods

[0975] In one study, the TBMs were compared across multiple donor effector cells. Briefly, huCD19-expressing Nalm6 and Karpas422 target cells were engineered to overexpress firefly luciferase. Cells were harvested and resuspended in RPMI medium (Invitrogen #11875-093) with 10% FBS. 2,500 target cells per well were plated in a flat-bottom 384-well plate. Human pan T effector cells were isolated via MACS negative selection (Miltenyi Biotec #130-096-535) from two donors from cryopreserved PBMCs (Cellular Technologies Limited #CTL-UP1), then added to the plate to obtain a final E:T ratio of 3:1 or 5:1. Co-cultured cells were incubated with serial dilutions of a TBM or control. For normalization, average maximum luminescence refers to target cells co-incubated with effector cells, but without any test construct. After an incubation of 24, 48, 72 or 96 hr at 37° C., 5% CO2, OneGlo luciferase substrate (Promega #E6120) was added to the plate. Luminescence was measured on an Envision plate reader after a 10 minute incubation. Percent specific lysis was calculated using the following equation: Specific lysis (%)=(1−(sample luminescence/average maximum luminescence))*100

### 8.8.2. Results

[0976] As shown in FIGS. 10A-10P, the TBMs show cytotoxic activity against both Nalm6 target cells (FIGS. 10A-10H) and Karpas422 (FIGS. 101-10P) at multiple time points, E:T ratios and effector T cell donors.

### 8.9. Example 9: RTCC Activity of the NEG258-Based TBMs Vs. BBMs and TBMs that do not Bind to CD2

[0977] The NEG258-based TBMs of Example 1A (i.e., R variants) containing either a CD2 binding arm or a control lysozyme binding arm were compared for their potential to induce T cell-mediated apoptosis in Nalm6 or Karpas422 target cells target cells. The study also included blinatumomab as a control. Blinatumomab is a bispecific T cell engager, or BiTE, that binds to both CD19 and CD3 but lacks an Fc domain (see, e.g., U.S. Pat. No. 10,191,034).

### 8.9.1. Materials and Methods

[0978] The purified TBMs were compared across multiple donor effector cells. Briefly, huCD19-expressing Nalm6 and Karpas422 target cells were engineered to overexpress firefly luciferase. Cells were harvested and resuspended in RPMI medium (Invitrogen #11875-093) with 10% FBS. 5,000 target cells per well were plated in a flat-bottom 384-well plate. Human pan T effector cells were isolated via negative selection (Stemcell Technologies #17951) from two donors from cryopreserved PBMCs that were separated from a leukopak (Hemacare #PB001F-1) by Ficoll density gradient centrifugation. Purified T cells were then added to the plate to obtain a final E:T ratio of 3:1, 1:1, 1:3 or 1:5. Co-cultured cells were incubated with serial dilutions of all constructs and controls. For normalization, average maximum luminescence refers to target cells co-incubated with effector cells, but without any test construct. After an incubation of 48, 72 or 96 hr at 37° C., 5% CO2, OneGlo luciferase substrate (Promega #E6120) was added to the plate. Luminescence was measured on an Envision plate reader after a 10 minute incubation. Percent specific lysis was calculated using the following equation: Specific lysis (%)=(1−(sample luminescence/average maximum luminescence))*100

### 8.9.2. Results

[0979] As shown in FIGS. 11A-11L, both types of TBMs show cytotoxic activity against both Nalm6 target cells (FIGS. 11A-11H) and Karpas422 cells (FIGS. 111-11L). The TBM containing a CD2 binding arm demonstrated superior cytotoxic activity compared to the control TBM with a lysozyme binding arm and to blinatumomab, particularly at lower E:T ratios.

### 8.10. Example 10: Cytokine Release Assay

[0980] NEG258- and NEG218-based TBMs of Example 1A (i.e., R variants) were analyzed for their ability to induce T cell-mediated de novo secretion of cytokines in the presence of tumor target cells.

### 8.10.1. Materials and Methods

[0981] Briefly, huCD19-expressing Nalm6 target cells were harvested and resuspended in RPMI medium with 10% FBS. 20,000 target cells per well were plated in a flat-bottom 96-well plate. Human pan T effector cells were isolated via MACS negative selection from cryopreserved PBMC then added to the plate to obtain a final E:T ratio of 5:1. Co-cultured cells were incubated with serial dilutions of all constructs and controls. After an incubation of 24 hr at 37° C., 5% CO2, the supernatants were harvested by centrifugation at 300×g for 5 min for subsequent analysis.

[0982] A multiplexed ELISA was performed according to the manufacturer's instructions using a V-PLEX Proinflammatory Panel 1 Kit (MesoScale Discovery #K15049D).

### 8.10.2. Results

[0983] As shown in FIGS. 12A-12C, both NEG258- and NEG218-based TBMs induce significant cytokine secretion by T cells at all dose levels measured. These figures indicate that they can be effective at lower doses.

### 8.11. Example 11: Binding of NEG258- and NEG218-Based TBMs to Human and Cyno CD19

### 8.11.1. Materials and Methods

[0984] The mouse cell line 300.19 was engineered to overexpress either human CD19 or cyno CD19. Cells were cultured in in RPMI medium (Invitrogen #11875-093) with 10% FBS and 2-mercaptoethanol. Cells were harvested and resuspended in FACS buffer (PBS containing 1% FBS). 50,000 cells per well were plated in a V-bottom 96-well plate. Each cell line was incubated with serial dilutions of TBMs of Example 1A (i.e., R variants) for one hour on ice. Cells were centrifuged for 4 min at 400×g and washed with FACS buffer. This was repeated twice, and then the cells were incubated with Alexa-647 labeled anti-human Fc secondary antibody (Jackson Immuno #109-605-098) for 30 min on ice. The cells were washed twice, then resuspended in 100 μL of FACS buffer. FACS data was collected on a Beckman Coulter Cytoflex and analysis was performed using CytExpert v2.3.

### 8.11.2. Results

[0985] As shown in FIGS. 13A-13B, the NEG258- and NEG218-based TBMs bind to cell lines engineered to overexpress both human and cyno CD19. NEG258 appears to bind equally to both human and cyno while NEG218 appears to have greater affinity for cyno CD19 than human CD19. Of the two, NEG258 appears to have greater affinity for both human CD19 and cyno CD19.

### 8.12. Example 12: Engineering CD58 for Improved Stability

### 8.12.1. Background

[0986] Human CD58 contains a signal peptide of 29 amino acids and two Ig-like domains. The most N-terminal Ig-like domain, referred to as domain 1, is of V-type, similar to a variable region of an antibody, and the second domain, named domain 2, is of C-type, is similar to a constant regions of an antibody. A schematic overview of the CD58 domain structure is shown in FIG. 14.

[0987] As illustrated in Examples 1-11, domain 1 of CD58, which interacts with CD2, can be used in lieu of an anti-CD2 antibody binding fragment in multispecific binding molecules. The use of a CD58 binding arm rather than an anti-CD2 binding arm reduces non-specific immune activation in the absence of target cells. However, CD58 exhibits lower stability than immunoglobulins.

[0988] In order to improve stability of human CD58 domain 1, the protein was engineered to include a pair of cysteine that form a disulfide bridge upon expression to stabilize the molecule.

[0989] Four different pairs of amino acids were engineered to be replaced by cysteines: (1) V45 and M105, (2) V45 and M114, (3) V54 and G88 and (4) W56 and L90.

### 8.12.2. Materials and Methods

[0990] 8.12.2.1. Recombinant Expression

[0991] To assess the binding and biophysical characteristics, the CD58 disulfide variants were transiently produced and purified from HEK293 cells along with the CD2 extracellular domain. All plasmids were codon optimized for mammalian expression. Human and cyno CD2 constructs were produced with a C-terminal Avi-Tag and a N terminal 8×his tag (SEQ ID NO: 769) followed by a EVNLYFQS sequence (SEQ ID NO: 770) for cleavage of the histag after purification. CD2 constructs were site selectively biotinylated during expression via co-transfection of a plasmid encoding the BirA enzyme. CD58 was expressed with a C-terminal 8×his tag (SEQ ID NO: 769). Transient expression and purification in HEK293F cells was performed with standard methodology. The sequences are shown in Table 20.

TABLE 20

| | | SEQ |
|---|---|---|
| Protein | | ID |
| Name | AA Sequence | NO: |
| Human | SKEITNALETWGALGQDINLDIPSFQMSDDIDD | 771 |
| CD2 | IKWEKTSDKKKIAQFRKEKETFKEKDTYKLFKN | |
| | GTLKIKHLKTDDQDIYKVSIYDTKGKNVLEKIF | |
| | DLKIQERVSKPKISWTCINTTLTCEVMNGTDPE | |
| | LNLYQDGKHLKLSQRVITHKWTTSLSAKFKCTA | |
| | GNKVSKESSVEPVSCPEKGLDGGGGSGLNDIFE | |
| | AQKIEWHE | |
| Cyno | SKEIRNALETWGALGQDIDLDIPSFQMSDDIDD | 772 |
| CD2 | IRWEKTSDKKKIAQFRKEKETFEEKDAYKLFKN | |
| | GTLKIKHLKIHDQDSYKVSIYDTKGKNVLEKTF | |
| | DLKIQERVSEPKISWTCINTTLTCEVMNGTDPE | |
| | LNLYQDGKHVKLSQRVITHKWTTSLSAKFKCTA | |
| | GNKVSKESRMETVSCPEKGLDGGGGSGLNDIFE | |
| | AQKIEWHE | |
| CD58 | SQQIYGVVYGNVTFHVPSNVPLKEVLWKKQKDK | 773 |
| Full | VAELENSEFRAFSSFKNRVYLDTVSGSLTIYNL | |
| ECD | TSSDEDEYEMESPNITDTMKFFLYVLESLPSPT | |
| | LTCALTNGSIEVQCMIPEHYNSHRGLIMYSWDC | |
| | PMEQCKRNSTSIYFKMENDLPQKIQCTLSNPLF | |
| | NTTSSIILTTCIPSSGHSRHRGGGGSHHHHHHH | |
| | H | |
| CD58_ | SQQIYGVVYGNVTFHVPSNVPLKEVLWKKQKDK | 774 |
| IgV | VAELENSEFRAFSSFKNRVYLDTVSGSLTIYNL | |
| | TSSDEDEYEMESPNITDTMKFFLYVLESGGGGS | |
| | HHHHHHHH | |
| IgV | SQQIYGVVYGNVTFHCPSNVPLKEVLWKKQKDK | 775 |
| V45C_ | VAELENSEFRAFSSFKNRVYLDTVSGSLTIYNL | |
| M105C | TSSDEDEYECESPNITDTMKFFLYVLESGGGGS | |
| | HHHHHHHH | |
| IgV | SQQIYGVVYGNVTFHVPSNVPLKECLWKKQKDK | 776 |
| V54C_ | VAELENSEFRAFSSFKNRVYLDTVSCSLTIYNL | |
| G88C | TSSDEDEYEMESPNITDTMKFFLYVLESGGGGS | |
| | HHHHHHHH | |
| IgV | SQQIYGVVYGNVTFHCPSNVPLKEVLWKKQKDK | 777 |
| V45C_ | VAELENSEFRAFSSFKNRVYLDTVSGSLTIYNL | |
| M114C | TSSDEDEYEMESPNITDTCKFFLYVLESGGGGS | |
| | HHHHHHHH | |

[0992] For expression, transfection was performed using PEI as transfection reagent. For small scale (<5L) transfections, cells were grown in shake flasks on an orbital shaker (100 rpm) in a humidified incubator (85%) at 8% CO2). Transfection was done with a ratio of 1 DNA:3 PEI. 1 mg/L culture of plasm id was used for transfection at 2.0 million cells/mL in Expi293 medium. After 5 days of expression, the culture was centrifuged and filtrated. Purification was performed via Nickel-NTA batch binding using 1 ml resin/100 mL supernatant. The protein was allowed to bind for a minimum of 2 hours with gentle mixing, and the mixture was loaded onto a gravity filtration column. The resin was washed with 30 CV of PBS. Proteins were eluted with imidazole. The eluted protein was concentrated and finally purified via a preparative size exclusion chromatography (Hi Load 16/60 Superdex 75 grade column, GE Healthcare Life Sciences, Uppsala, Sweden). To confirm that the identity of the proteins expressed matched the predicted masses for the primary amino acid sequences, proteins were analyzed by high-performance liquid chromatography coupled to mass spectrometry.

### 8.12.2.2. Stability

[0993] Disulfide stabilized variants were assessed for improved thermal stability using both differential scanning calorimetry (DSC) and differential scanning fluorimetry (DSF) using standard techniques. For DSF, 1-3 ug of each construct was add to 1× Sypro Orange (Thermo-Fisher) in 25 ul total volume in 96-well PCR plate. Using a Bio-Rad CFX96 RT-PCR system equipped with C1000 Thermal Cycler, the temperature was increased from 25° C. to 95° C. at 0.5° C./minute and the fluorescence monitored. The manufacturer-supplied software was used to determine Tm.

[0994] For DSC, all samples were dialyzed into HEPES-buffered saline (HBS) and diluted to final concentration of 0.5 mg/mL. Tm and Tonset were determined using a MicroCal VP-Capillary DSC system (Malvern) by increasing temperature from 25° C. to 100° C. at 1° C./minute with a filtering period of 2 seconds and a mid-gain setting.

### 8.12.2.3. Binding Affinity

[0995] To ensure the binding affinity remained uncompromised by the additional of the stabilizing disulfide variance, isothermal calorimetry (ITC) was performed on the resulting recombinant CD58 proteins to determine their apparent KD and binding stoicheometry (n) to recombinant human CD2.

[0996] Briefly, recombinant human CD2 and recombinant human CD58 variants were dialyzed into HEPES-buffered saline (HBS). CD2 was diluted to final concentration of 100 μM, CD58 variants were diluted to 10 μM. CD2 was titrated into 10 μM of CD58 variants via multiple injections and ΔH (kcal/mole) determined using a MicroCal VP-ITC isothermal titration calorimeter (Malvern). Titrations of CD2 into HBS were used as a reference and KD and n determined from the resulting data.

### 8.12.3. Results

[0997] Results for both DSF and DSC measurements for the constructs are shown in Table 21 below.

TABLE 21

| | By Differential | | |
|---|---|---|---|
| | Scanning | By Differential Scanning | |
| | Fluorimetry (DSF) | Calorimetry (DSC) | |
| CD58 variant | Tm (° C.) | Tmonset (° C.) | Tm (° C.) |
| CD58 Full ECD | 59.5 | 48.8 | 65.0 |
| CD58_IgV | 48.5 | 46.3 | 60.9 |
| IgV V45C_M105C | 48.5 | 43.9 | 66.8 |
| IgV V54C_G88C | 76.5 | 66.7 | 80.9 |
| IgV V45C_M114C | 63.5 | 49.6 | 72.5 |

[0998] Results of the affinity studies are shown in Table 22 below. Addition of stabilizing disulfide had no detrimental impact on the affinity or the binding stoicheometry.

TABLE 22

| CD58 variant | KD (uM) | n | |
|---|---|---|---|
| CD58 Full ECD | 0.57 (+0.05) | 0.92 | (+0.01) |
| CD58_IgV | 0.61 (+0.07) | 0.96 | (+0.01) |
| IgV V45C_M105C | 0.88 (+0.06) | 0.97 | (+0.01) |
| IgV V54C_G88C | 0.60 (+0.06) | 0.83 | (+.0.01) |
| IgV V45C_M114C | 0.38 (+0.03) | 0.88 | (+.0.01) |

### 8.13. Example 13: Production of Anti-CD3-Anti-CD19-CD58 IgG1 TBMs in Knob-into-Holes Format

### 8.13.1. Materials and Methods

[0999] Constructs were synthesized and codon optimized for expression in mammalian cells. For each trispecific construct, three plasmids were synthesized. A first plasmid encoding an anti-CD19 heavy chain was synthesized as a fusion comprising (in the N-terminal to C-terminal direction) (i) a VH domain fused to a constant hIgG1 CH1 domain, (ii) a linker, (iii) an anti-CD3 scFv, (iv) a second linker and (v) a hIgG1 Fc domain containing mutations for a hole to facilitate heterodimerization as well as silencing mutations. A second plasmid encoding a light chain was synthesized as a fusion comprising (in the N-terminal to C-terminal direction) an anti-CD19 VL domain and (ii) a constant human kappa sequence. A third plasmid encoding a second half antibody was synthesized as a fusion comprising (in the N-terminal to C-terminal direction) a CD58 disulfide stabilized variant fused to a constant hIgG1 domain containing mutations for a knob to facilitate heterodimerization as well as silencing mutations. The sequences are shown in Table 23.

TABLE 23

| Trispecific | Chain | | SEQ ID |
|---|---|---|---|
| Name | Description | Sequence | NO: |
| CD19_CTL119_ | First Half | QVQLQESGPGLVKPSETLSLTCTVSGVSLPDYG | 778 |
| CD3_16nM- | Antibody | VSWIRQPPGKGLEWIGVIWGSETTYYQSSLKSR | |
| CD58_Full ECD | Heavy Chain | VTISKDNSKNQVSLKLSSVTAADTAVYYCAKHY | |
| Trispecific | (Fc | YYGGSYAMDYWGQGTLVTVSSASTKGPSVFPL | |
| | sequence | APSSKSTSGGTAALGCLVKDYFPEPVTVSWNS | |
| | not shown) | GALTSGVHTFPAVLQSSGLYSLSSVVTVPSSSL | |
| | | GTQTYICNVNHKPSNTKVDKRVEPKSCGGGGS | |
| | | GGGGSEVQLVESGGGLVQPGGSLKLSCAASGF | |
| | | TFNTYAMNWVRQASGKGLEWVGRIRSKYNNYA | |
| | | TYYADSVKDRFTISRDDSKSTLYLQMNSLKTED | |
| | | TAVYYCVRHGNFGNSYVSWFAYWGQGTLVTVS | |
| | | SGGGGSGGGGSGGGGSGGGGSQAVVTQEPS | |
| | | LTVSPGGTVTLTCRSSTGAVTTSNYANWVQQK | |
| | | PGQAPRGLIGGTNKRAPWTPARFSGSLLGDKA | |
| | | ALTLSGAQPEDEAEYFCALWYSNLWVFGGGTK | |
| | | LTVLGGGGS | |
| | First Half | QVQLQESGPGLVKPSETLSLTCTVSGVSLPDYG | 1094 |
| | Antibody | VSWIRQPPGKGLEWIGVIWGSETTYYQSSLKSR | |
| | Heavy Chain | VTISKDNSKNQVSLKLSSVTAADTAVYYCAKHY | |
| | (includes Fc | YYGGSYAMDYWGQGTLVTVSSASTKGPSVFPL | |
| | sequence) | APSSKSTSGGTAALGCLVKDYFPEPVTVSWNS | |
| | | GALTSGVHTFPAVLQSSGLYSLSSVVTVPSSSL | |
| | | GTQTYICNVNHKPSNTKVDKRVEPKSCGGGGS | |
| | | GGGGSEVQLVESGGGLVQPGGSLKLSCAASGF | |
| | | TFNTYAMNWVRQASGKGLEWVGRIRSKYNNYA | |
| | | TYYADSVKDRFTISRDDSKSTLYLQMNSLKTED | |
| | | TAVYYCVRHGNFGNSYVSWFAYWGQGTLVTVS | |
| | | SGGGGSGGGGSGGGGSGGGGSQAVVTQEPS | |
| | | LTVSPGGTVTLTCRSSTGAVTTSNYANWVQQK | |
| | | PGQAPRGLIGGTNKRAPWTPARFSGSLLGDKA | |
| | | ALTLSGAQPEDEAEYFCALWYSNLWVFGGGTK | |
| | | LTVLGGGGSDKTHTCPPCPAPELLGGPSVFLFP | |
| | | PKPKDTLMISRTPEVTCVVVAVSHEDPEVKFNW | |
| | | YVDGVEVHNAKTKPREEQYGSTYRVVSVLTVLH | |
| | | QDWLNGKEYKCKVSNKALAAPIEKTISKAKGQP | |
| | | REPQVCTLPPSRDELTKNQVSLSCAVKGFYPSD | |
| | | IAVEWESNGQPENNYKTTPPVLDSDGSFFLVSK | |
| | | LTVDKSRWQQGNVFSCSVMHEALHNHYTQKSL | |
| | | SLSPGK | |
| | Second Half | FSQQIYGVVYGNVTFHVPSNVPLKEVLWKKQKD | 779 |
| | Antibody | KVAELENSEFRAFSSFKNRVYLDTVSGSLTIYNL | |
| | (Fc | TSSDEDEYEMESPNITDTMKFFLYVLESLPSPTL | |
| | sequence | TCALTNGSIEVQCMIPEHYNSHRGLIMYSWDCP | |
| | not shown) | MEQCKRNSTSIYFKMENDLPQKIQCTLSNPLFN | |
| | | TTSSIILTTCIPSSGHSRHRGGGS | |
| | Second Half | FSQQIYGVVYGNVTFHVPSNVPLKEVLWKKQKD | 1095 |
| | Antibody | KVAELENSEFRAFSSFKNRVYLDTVSGSLTIYNL | |
| | (includes Fc | TSSDEDEYEMESPNITDTMKFFLYVLESLPSPTL | |
| | sequence) | TCALTNGSIEVQCMIPEHYNSHRGLIMYSWDCP | |
| | | MEQCKRNSTSIYFKMENDLPQKIQCTLSNPLFN | |
| | | TTSSIILTTCIPSSGHSRHRGGGSDKTHTCPPCP | |
| | | APELLGGPSVFLFPPKPKDTLMISRTPEVTCVVV | |
| | | DVSHEDPEVKFNWYVDGVEVHNAKTKPREEQY | |
| | | ASTYRVVSVLTVLHQDWLNGKEYKCKVSNKALP | |
| | | APIEKTISKAKGQPREPQVYTLPPCREEMTKNQ | |
| | | VSLWCLVKGFYPSDIAVEWESNGQPENNYKTT | |
| | | PPVLDSDGSFFLYSKLTVDKSRWQQGNVFSCS | |
| | | VMHEALHNRYTQKSLSLSPGK | |
| | First Half | EIVMTQSPATLSLSPGERATLSCRASQDISKYLN | 780 |
| | Antibody | WYQQKPGQAPRLLIYHTSRLHSGIPARFSGSGS | |
| | Light Chain | GTDYTLTISSLQPEDFAVYFCQQGNTLPYTFGQ | |
| | | GTKLEIKRTVAAPSVFIFPPSDEQLKSGTASVVC | |
| | | LLNNFYPREAKVQWKVDNALQSGNSQESVTEQ | |
| | | DSKDSTYSLSSTLTLSKADYEKHKVYACEVTHQ | |
| | | GLSSPVTKSFNRGEC | |
| CD19_CTL119_ | First Half | QVQLQESGPGLVKPSETLSLTCTVSGVSLPDYG | 778 |
| CD3_16nM- | Antibody | VSWIRQPPGKGLEWIGVIWGSETTYYQSSLKSR | |
| CD58_IgV | Heavy Chain | VTISKDNSKNQVSLKLSSVTAADTAVYYCAKHY | |
| Trispecific | (Fc | YYGGSYAMDYWGQGTLVTVSSASTKGPSVFPL | |
| | sequence | APSSKSTSGGTAALGCLVKDYFPEPVTVSWNS | |
| | not shown) | GALTSGVHTFPAVLQSSGLYSLSSVVTVPSSSL | |
| | | GTQTYICNVNHKPSNTKVDKRVEPKSCGGGGS | |
| | | GGGGSEVQLVESGGGLVQPGGSLKLSCAASGF | |
| | | TFNTYAMNWVRQASGKGLEWVGRIRSKYNNYA | |
| | | TYYADSVKDRFTISRDDSKSTLYLQMNSLKTED | |
| | | TAVYYCVRHGNFGNSYVSWFAYWGQGTLVTVS | |
| | | SGGGGSGGGGSGGGGSGGGGSQAVVTQEPS | |
| | | LTVSPGGTVTLTCRSSTGAVTTSNYANWVQQK | |
| | | PGQAPRGLIGGTNKRAPWTPARFSGSLLGDKA | |
| | | ALTLSGAQPEDEAEYFCALWYSNLWVFGGGTK | |
| | | LTVLGGGGS | |
| | First Half | QVQLQESGPGLVKPSETLSLTCTVSGVSLPDYG | 1094 |
| | Antibody | VSWIRQPPGKGLEWIGVIWGSETTYYQSSLKSR | |
| | Heavy Chain | VTISKDNSKNQVSLKLSSVTAADTAVYYCAKHY | |
| | (includes Fc | YYGGSYAMDYWGQGTLVTVSSASTKGPSVFPL | |
| | sequence) | APSSKSTSGGTAALGCLVKDYFPEPVTVSWNS | |
| | | GALTSGVHTFPAVLQSSGLYSLSSVVTVPSSSL | |
| | | GTQTYICNVNHKPSNTKVDKRVEPKSCGGGGS | |
| | | GGGGSEVQLVESGGGLVQPGGSLKLSCAASGF | |
| | | TFNTYAMNWVRQASGKGLEWVGRIRSKYNNYA | |
| | | TYYADSVKDRFTISRDDSKSTLYLQMNSLKTED | |
| | | TAVYYCVRHGNFGNSYVSWFAYWGQGTLVTVS | |
| | | SGGGGSGGGGSGGGGSGGGGSQAVVTQEPS | |
| | | LTVSPGGTVTLTCRSSTGAVTTSNYANWVQQK | |
| | | PGQAPRGLIGGTNKRAPWTPARFSGSLLGDKA | |
| | | ALTLSGAQPEDEAEYFCALWYSNLWVFGGGTK | |
| | | LTVLGGGGSDKTHTCPPCPAPELLGGPSVFLFP | |
| | | PKPKDTLMISRTPEVTCVVVAVSHEDPEVKFNW | |
| | | YVDGVEVHNAKTKPREEQYGSTYRVVSVLTVLH | |
| | | QDWLNGKEYKCKVSNKALAAPIEKTISKAKGQP | |
| | | REPQVCTLPPSRDELTKNQVSLSCAVKGFYPSD | |
| | | IAVEWESNGQPENNYKTTPPVLDSDGSFFLVSK | |
| | | LTVDKSRWQQGNVFSCSVMHEALHNHYTQKSL | |
| | | SLSPGK | |
| | Second Half | SQQIYGVVYGNVTFHVPSNVPLKEVLWKKQKD | 760 |
| | Antibody | KVAELENSEFRAFSSFKNRVYLDTVSGSLTIYNL | |
| | (Fc | TSSDEDEYEMESPNITDTMKFFLYVLESGGGGS | |
| | sequence | | |
| | not shown) | | |
| | Second Half | SQQIYGVVYGNVTFHVPSNVPLKEVLWKKQKD | 1078 |
| | Antibody | KVAELENSEFRAFSSFKNRVYLDTVSGSLTIYNL | |
| | (includes Fc | TSSDEDEYEMESPNITDTMKFFLYVLESGGGGS | |
| | sequence) | DKTHTCPPCPAPELLGGPSVFLFPPKPKDTLMIS | |
| | | RTPEVTCVVVAVSHEDPEVKFNWYVDGVEVHN | |
| | | AKTKPREEQYASTYRVVSVLTVLHQDWLNGKE | |
| | | YKCKVSNKALAAPIEKTISKAKGQPREPQVYTLP | |
| | | PCREEMTKNQVSLWCLVKGFYPSDIAVEWESN | |
| | | GQPENNYKTTPPVLDSDGSFFLYSKLTVDKSR | |
| | | WQQGNVFSCSVMHEALHNRYTQKSLSLSPGK | |
| | First Half | EIVMTQSPATLSLSPGERATLSCRASQDISKYLN | 780 |
| | Antibody | WYQQKPGQAPRLLIYHTSRLHSGIPARFSGSGS | |
| | Light Chain | GTDYTLTISSLQPEDFAVYFCQQGNTLPYTFGQ | |
| | | GTKLEIKRTVAAPSVFIFPPSDEQLKSGTASVVC | |
| | | LLNNFYPREAKVQWKVDNALQSGNSQESVTEQ | |
| | | DSKDSTYSLSSTLTLSKADYEKHKVYACEVTHQ | |
| | | GLSSPVTKSFNRGEC | |
| CD19_CTL119 | First Half | QVQLQESGPGLVKPSETLSLTCTVSGVSLPDYG | 778 |
| CD3_16nM- | Antibody | VSWIRQPPGKGLEWIGVIWGSETTYYQSSLKSR | |
| CD58_IgV_ | Heavy Chain | VTISKDNSKNQVSLKLSSVTAADTAVYYCAKHY | |
| V45C_M105C | (Fc | YYGGSYAMDYWGQGTLVTVSSASTKGPSVFPL | |
| Trispecific | sequence | APSSKSTSGGTAALGCLVKDYFPEPVTVSWNS | |
| | not shown) | GALTSGVHTFPAVLQSSGLYSLSSVVTVPSSSL | |
| | | GTQTYICNVNHKPSNTKVDKRVEPKSCGGGGS | |
| | | GGGGSEVQLVESGGGLVQPGGSLKLSCAASGF | |
| | | TFNTYAMNWVRQASGKGLEWVGRIRSKYNNYA | |
| | | TYYADSVKDRFTISRDDSKSTLYLQMNSLKTED | |
| | | TAVYYCVRHGNFGNSYVSWFAYWGQGTLVTVS | |
| | | SGGGGSGGGGGGGGSGGGGSQAVVTQEPS | |
| | | LTVSPGGTVTLTCRSSTGAVTTSNYANWVQQK | |
| | | PGQAPRGLIGGTNKRAPWTPARFSGSLLGDKA | |
| | | ALTLSGAQPEDEAEYFCALWYSNLWVFGGGTK | |
| | | LTVLGGGGS | |
| | First Half | QVQLQESGPGLVKPSETLSLTCTVSGVSLPDYG | 1094 |
| | Antibody | VSWIRQPPGKGLEWIGVIWGSETTYYQSSLKSR | |
| | Heavy Chain | VTISKDNSKNQVSLKLSSVTAADTAVYYCAKHY | |
| | (includes Fc | YYGGSYAMDYWGQGTLVTVSSASTKGPSVFPL | |
| | sequence) | APSSKSTSGGTAALGCLVKDYFPEPVTVSWNS | |
| | | GALTSGVHTFPAVLQSSGLYSLSSVVTVPSSSL | |
| | | GTQTYICNVNHKPSNTKVDKRVEPKSCGGGGS | |
| | | GGGGSEVQLVESGGGLVQPGGSLKLSCAASGF | |
| | | TFNTYAMNWVRQASGKGLEWVGRIRSKYNNYA | |
| | | TYYADSVKDRFTISRDDSKSTLYLQMNSLKTED | |
| | | TAVYYCVRHGNFGNSYVSWFAYWGQGTLVTVS | |
| | | SGGGGSGGGGSGGGGSGGGGSQAVVTQEPS | |
| | | LTVSPGGTVTLTCRSSTGAVTTSNYANWVQQK | |
| | | PGQAPRGLIGGTNKRAPWTPARFSGSLLGDKA | |
| | | ALTLSGAQPEDEAEYFCALWYSNLWVFGGGTK | |
| | | LTVLGGGGSDKTHTCPPCPAPELLGGPSVFLFP | |
| | | PKPKDTLMISRTPEVTCVVVAVSHEDPEVKFNW | |
| | | YVDGVEVHNAKTKPREEQYGSTYRVVSVLTVLH | |
| | | QDWLNGKEYKCKVSNKALAAPIEKTISKAKGQP | |
| | | REPQVCTLPPSRDELTKNQVSLSCAVKGFYPSD | |
| | | IAVEWESNGQPENNYKTTPPVLDSDGSFFLVSK | |
| | | LTVDKSRWQQGNVFSCSVMHEALHNHYTQKSL | |
| | | SLSPGK | |
| | Second Half | SQQIYGVVYGNVTFHCPSNVPLKEVLWKKQKD | 781 |
| | Antibody | KVAELENSEFRAFSSFKNRVYLDTVSGSLTIYNL | |
| | (Fc | TSSDEDEYECESPNITDTMKFFLYVLESGS | |
| | sequence | | |
| | not shown) | | |
| | Second Half | SQQIYGVVYGNVTFHCPSNVPLKEVLWKKQKD | 1096 |
| | Antibody | KVAELENSEFRAFSSFKNRVYLDTVSGSLTIYNL | |
| | (includes Fc | TSSDEDEYECESPNITDTMKFFLYVLESGSDKT | |
| | sequence) | HTCPPCPAPELLGGPSVFLFPPKPKDTLMISRTP | |
| | | EVTCVVVDVSHEDPEVKFNWYVDGVEVHNAKT | |
| | | KPREEQYASTYRVVSVLTVLHQDWLNGKEYKC | |
| | | KVSNKALPAPIEKTISKAKGQPREPQVYTLPPCR | |
| | | EEMTKNQVSLWCLVKGFYPSDIAVEWESNGQP | |
| | | ENNYKTTPPVLDSDGSFFLYSKLTVDKSRWQQ | |
| | | GNVFSCSVMHEALHNRYTQKSLSLSPGK | |
| | First Half | EIVMTQSPATLSLSPGERATLSCRASQDISKYLN | 780 |
| | Antibody | WYQQKPGQAPRLLIYHTSRLHSGIPARFSGSGS | |
| | Light Chain | GTDYTLTISSLQPEDFAVYFCQQGNTLPYTFGQ | |
| | | GTKLEIKRTVAAPSVFIFPPSDEQLKSGTASVVC | |
| | | LLNNFYPREAKVQWKVDNALQSGNSQESVTEQ | |
| | | DSKDSTYSLSSTLTLSKADYEKHKVYACEVTHQ | |
| | | GLSSPVTKSFNRGEC | |
| CD19_CTL119_ | First Half | QVQLQESGPGLVKPSETLSLTCTVSGVSLPDYG | 778 |
| CD3_16nM- | Antibody | VSWIRQPPGKGLEWIGVIWGSETTYYQSSLKSR | |
| CD58_IgV_ | Heavy Chain | VTISKDNSKNQVSLKLSSVTAADTAVYYCAKHY | |
| V54C_G88C | (Fc | YYGGSYAMDYWGQGTLVTVSSASTKGPSVFPL | |
| Trispecific | sequence | APSSKSTSGGTAALGCLVKDYFPEPVTVSWNS | |
| | not shown) | GALTSGVHTFPAVLQSSGLYSLSSVVTVPSSSL | |
| | | GTQTYICNVNHKPSNTKVDKRVEPKSCGGGGS | |
| | | GGGGSEVQLVESGGGLVQPGGSLKLSCAASGF | |
| | | TFNTYAMNWVRQASGKGLEWVGRIRSKYNNYA | |
| | | TYYADSVKDRFTISRDDSKSTLYLQMNSLKTED | |
| | | TAVYYCVRHGNFGNSYVSWFAYWGQGTLVTVS | |
| | | SGGGGSGGGGSGGGGGGGGSQAVVTQEPS | |
| | | LTVSPGGTVTLTCRSSTGAVTTSNYANWVQQK | |
| | | PGQAPRGLIGGTNKRAPWTPARFSGSLLGDKA | |
| | First Half | ALTLSGAQPEDEAEYFCALWYSNLWVFGGGTK | 1094 |
| | Antibody | LTVLGGGGS | |
| | Heavy Chain | QVQLQESGPGLVKPSETLSLTCTVSGVSLPDYG | |
| | (includes Fc | VSWIRQPPGKGLEWIGVIWGSETTYYQSSLKSR | |
| | sequence) | VTISKDNSKNQVSLKLSSVTAADTAVYYCAKHY | |
| | | YYGGSYAMDYWGQGTLVTVSSASTKGPSVFPL | |
| | | APSSKSTSGGTAALGCLVKDYFPEPVTVSWNS | |
| | | GALTSGVHTFPAVLQSSGLYSLSSVVTVPSSSL | |
| | | GTQTYICNVNHKPSNTKVDKRVEPKSCGGGGS | |
| | | GGGGSEVQLVESGGGLVQPGGSLKLSCAASGF | |
| | | TFNTYAMNWVRQASGKGLEWVGRIRSKYNNYA | |
| | | TYYADSVKDRFTISRDDSKSTLYLQMNSLKTED | |
| | | TAVYYCVRHGNFGNSYVSWFAYWGQGTLVTVS | |
| | | SGGGGSGGGGSGGGGSGGGGSQAVVTQEPS | |
| | | LTVSPGGTVTLTCRSSTGAVTTSNYANWVQQK | |
| | | PGQAPRGLIGGTNKRAPWTPARFSGSLLGDKA | |
| | | ALTLSGAQPEDEAEYFCALWYSNLWVFGGGTK | |
| | | LTVLGGGGSDKTHTCPPCPAPELLGGPSVFLFP | |
| | | PKPKDTLMISRTPEVTCVVVAVSHEDPEVKFNW | |
| | | YVDGVEVHNAKTKPREEQYGSTYRVVSVLTVLH | |
| | | QDWLNGKEYKCKVSNKALAAPIEKTISKAKGQP | |
| | | REPQVCTLPPSRDELTKNQVSLSCAVKGFYPSD | |
| | | IAVEWESNGQPENNYKTTPPVLDSDGSFFLVSK | |
| | | LTVDKSRWQQGNVFSCSVMHEALHNHYTQKSL | |
| | | SLSPGK | |
| | Second Half | SQQIYGVVYGNVTFHVPSNVPLKECLWKKQKD | 782 |
| | Antibody | KVAELENSEFRAFSSFKNRVYLDTVSCSLTIYNL | |
| | (Fc | TSSDEDEYEMESPNITDTMKFFLYVLESGS | |
| | sequence | | |
| | not shown) | | |
| | Second Half | SQQIYGVVYGNVTFHVPSNVPLKECLWKKQKD | 1097 |
| | Antibody | KVAELENSEFRAFSSFKNRVYLDTVSCSLTIYNL | |
| | (includes Fc | TSSDEDEYEMESPNITDTMKFFLYVLESGSDKT | |
| | sequence) | HTCPPCPAPELLGGPSVFLFPPKPKDTLMISRTP | |
| | | EVTCVVVDVSHEDPEVKFNWYVDGVEVHNAKT | |
| | | KPREEQYASTYRVVSVLTVLHQDWLNGKEYKC | |
| | | KVSNKALPAPIEKTISKAKGQPREPQVYTLPPCR | |
| | | EEMTKNQVSLWCLVKGFYPSDIAVEWESNGQP | |
| | | ENNYKTTPPVLDSDGSFFLYSKLTVDKSRWQQ | |
| | | GNVFSCSVMHEALHNRYTQKSLSLSPGK | |
| | First Half | EIVMTQSPATLSLSPGERATLSCRASQDISKYLN | 780 |
| | Antibody | WYQQKPGQAPRLLIYHTSRLHSGIPARFSGSGS | |
| | Light Chain | GTDYTLTISSLQPEDFAVYFCQQGNTLPYTFGQ | |
| | | GTKLEIKRTVAAPSVFIFPPSDEQLKSGTASVVC | |
| | | LLNNFYPREAKVQWKVDNALQSGNSQESVTEQ | |
| | | DSKDSTYSLSSTLTLSKADYEKHKVYACEVTHQ | |
| | | GLSSPVTKSFNRGEC | |
| CD19_CTL119_ | First Half | QVQLQESGPGLVKPSETLSLTCTVSGVSLPDYG | 778 |
| CD3_16nM- | Antibody | VSWIRQPPGKGLEWIGVIWGSETTYYQSSLKSR | |
| CD58_IgV | Heavy Chain | VTISKDNSKNQVSLKLSSVTAADTAVYYCAKHY | |
| V45C_M114C | (Fc | YYGGSYAMDYWGQGTLVTVSSASTKGPSVFPL | |
| Trispecific | sequence | APSSKSTSGGTAALGCLVKDYFPEPVTVSWNS | |
| | not shown) | GALTSGVHTFPAVLQSSGLYSLSSVVTVPSSSL | |
| | | GTQTYICNVNHKPSNTKVDKRVEPKSCGGGGS | |
| | | GGGGSEVQLVESGGGLVQPGGSLKLSCAASGF | |
| | | TFNTYAMNWVRQASGKGLEWVGRIRSKYNNYA | |
| | | TYYADSVKDRFTISRDDSKSTLYLQMNSLKTED | |
| | | TAVYYCVRHGNFGNSYVSWFAYWGQGTLVTVS | |
| | | SGGGGSGGGGSGGGGSGGGGSQAVVTQEPS | |
| | | LTVSPGGTVTLTCRSSTGAVTTSNYANWVQQK | |
| | | PGQAPRGLIGGTNKRAPWTPARFSGSLLGDKA | |
| | | ALTLSGAQPEDEAEYFCALWYSNLWVFGGGTK | |
| | | LTVLGGGGS | |
| | First Half | QVQLQESGPGLVKPSETLSLTCTVSGVSLPDYG | 1094 |
| | Antibody | VSWIRQPPGKGLEWIGVIWGSETTYYQSSLKSR | |
| | Heavy Chain | VTISKDNSKNQVSLKLSSVTAADTAVYYCAKHY | |
| | (includes Fc | YYGGSYAMDYWGQGTLVTVSSASTKGPSVFPL | |
| | sequence) | APSSKSTSGGTAALGCLVKDYFPEPVTVSWNS | |
| | | GALTSGVHTFPAVLQSSGLYSLSSVVTVPSSSL | |
| | | GTQTYICNVNHKPSNTKVDKRVEPKSCGGGGS | |
| | | GGGGSEVQLVESGGGLVQPGGSLKLSCAASGF | |
| | | TFNTYAMNWVRQASGKGLEWVGRIRSKYNNYA | |
| | | TYYADSVKDRFTISRDDSKSTLYLQMNSLKTED | |
| | | TAVYYCVRHGNFGNSYVSWFAYWGQGTLVTVS | |
| | | SGGGGSGGGGSGGGGSGGGGSQAVVTQEPS | |
| | | LTVSPGGTVTLTCRSSTGAVTTSNYANWVQQK | |
| | | PGQAPRGLIGGTNKRAPWTPARFSGSLLGDKA | |
| | | ALTLSGAQPEDEAEYFCALWYSNLWVFGGGTK | |
| | | LTVLGGGGSDKTHTCPPCPAPELLGGPSVFLFP | |
| | | PKPKDTLMISRTPEVTCVVVAVSHEDPEVKFNW | |
| | | YVDGVEVHNAKTKPREEQYGSTYRVVSVLTVLH | |
| | | QDWLNGKEYKCKVSNKALAAPIEKTISKAKGQP | |
| | | REPQVCTLPPSRDELTKNQVSLSCAVKGFYPSD | |
| | | IAVEWESNGQPENNYKTTPPVLDSDGSFFLVSK | |
| | | LTVDKSRWQQGNVFSCSVMHEALHNHYTQKSL | |
| | | SLSPGK | |
| | Second Half | SQQIYGVVYGNVTFHCPSNVPLKEVLWKKQKD | 783 |
| | Antibody | KVAELENSEFRAFSSFKNRVYLDTVSGSLTIYNL | |
| | (Fc | TSSDEDEYEMESPNITDTCKFFLYVLESGS | |
| | sequence | | |
| | not shown) | | |
| | Second Half | SQQIYGVVYGNVTFHCPSNVPLKEVLWKKQKD | 1098 |
| | Antibody | KVAELENSEFRAFSSFKNRVYLDTVSGSLTIYNL | |
| | (includes Fc | TSSDEDEYEMESPNITDTCKFFLYVLESGSDKT | |
| | sequence) | HTCPPCPAPELLGGPSVFLFPPKPKDTLMISRTP | |
| | | EVTCVVVDVSHEDPEVKFNWYVDGVEVHNAKT | |
| | | KPREEQYASTYRVVSVLTVLHQDWLNGKEYKC | |
| | | KVSNKALPAPIEKTISKAKGQPREPQVYTLPPCR | |
| | | EEMTKNQVSLWCLVKGFYPSDIAVEWESNGQP | |
| | | ENNYKTTPPVLDSDGSFFLYSKLTVDKSRWQQ | |
| | | GNVFSCSVMHEALHNRYTQKSLSLSPGK | |
| | First Half | EIVMTQSPATLSLSPGERATLSCRASQDISKYLN | 780 |
| | Antibody | WYQQKPGQAPRLLIYHTSRLHSGIPARFSGSGS | |
| | Light Chain | GTDYTLTISSLQPEDFAVYFCQQGNTLPYTFGQ | |
| | | GTKLEIKRTVAAPSVFIFPPSDEQLKSGTASVVC | |
| | | LLNNFYPREAKVQWKVDNALQSGNSQESVTEQ | |
| | | DSKDSTYSLSSTLTLSKADYEKHKVYACEVTHQ | |
| | | GLSSPVTKSFNRGEC | |

[1000] Trispecific binding molecules were expressed transiently by co-transfection of the respective chains in HEK293 cells.

[1001] Briefly, transfection was performed using PEI as transfection reagent. For small scale (<5L) transfections, cells were grown in shake flasks on an orbital shaker (115 rpm) in a humidified incubator (85%) at 5% CO2). Plasmids were combined with PEI at a final ratio of 1 DNA:3 PEI. 1 mg/L culture of plasmid was used for transfection at 2.0 million cells/mL serum media. After 5 days of expression, the TBMs were harvested by clarification of the media via centrifugation and filtration. Purification was performed via anti-CH1 affinity batch binding (CaptureSelect IgG-CH1 Affinity Matrix, Thermo-Fisher Scientific, Waltham, MA, USA) or Protein A (rProteinA Sepharose, Fast flow, GE Healthcare, Uppsala, Sweden) batch binding using 1 ml resin/100 mL supernatant. The protein was allowed to bind for a minimum of 2 hours with gentle mixing, and the supernatant loaded onto a gravity filtration column. The resin was washed with 20-50 CV of PBS. TBMs were eluted with 20 CV of 50 mM citrate, 90 mM NaCl pH 3.2. 50 mM sucrose The eluted TBMs were adjusted to pH 5.5 with 1 M sodium citrate 50 mM sucrose. Preparative size exclusion chromatography was performed using Hi Load 16/60 Superdex 200 grade column (GE Healthcare Life Sciences, Uppsala, Sweden) as a final polishing step when aggregates were presented. To confirm that the identity of the proteins of the TBMs expressed matched the predicted masses for the primary amino acid sequences, proteins were analyzed by high-performance liquid chromatography coupled to mass spectrometry.

### 8.13.2. Results

[1002] As shown in Table 24 below, inclusion of stabilizing disulfide variants had no adverse impact on overall expression yields of increased aggregate content upon purification.

TABLE 24

| | Expression | |
|---|---|---|
| | (mg/L) | % HMWS |
| CD19_CTL119_CD3_16nM-CD58_Full | 20 | <10% |
| ECD Trispecific (Full ECD WT) | | |
| CD19_CTL119_CD3_16nM-CD58_IgV | 20 | ~10 |
| Trispecific (IgV WT) | | |
| CD19_CTL119_CD3_16nM-CD58_IgV_V45C_M105C | 55 | ~10 |
| Trispecific (IgV V45C_M105C) | | |
| CD19_CTL119_CD3_16nM-CD58_IgV | 65 | ~10 |
| V54C_G88C Trispecific (IgV V54C_G88C) | | |
| CD19_CTL119_CD3_16nM-CD58_IgV | 63 | ~10 |
| V45C_M114C Trispecific (IgV V45C_M114C) | | |

### 8.14. Example 14: Re-Directed T Cell Cytotoxicity with TBMs Containing CD58 Variants

[1003] TBMs of Example 13 containing the variant CD58 domains were analyzed for their potential to induce T cell-mediated apoptosis in tumor target cells.

### 8.14.1. Materials and Methods

[1004] Briefly, huCD19-expressing Nalm6 target cells were engineered to overexpress firefly luciferase. Cells were harvested and resuspended in RPMI medium (Invitrogen #11875-093) with 10% FBS. 10,000 target cells per well were plated in a flat-bottom 96-well plate. Human pan T effector cells were isolated via MACS negative selection (Miltenyi Biotec #130-096-535) from two donors from cryopreserved PBMC (Cellular Technologies Limited #CTL-UP1) then added to the plate to obtain a final E:T ratio of 5:1. Co-cultured cells were incubated with a serial dilution of all constructs and controls. For normalization, average maximum luminescence refers to target cells co-incubated with effector cells, but without any test construct. After an incubation of either 24 or 48 hr at 37° C., 5% CO2, OneGlo luciferase substrate (Promega #E6120) was added to the plate. Luminescence was measured on an Envision plate reader after a 10 minute incubation. Percent specific lysis was calculated using the following equation: Specific lysis (%)=(1−(sample luminescence/average maximum luminescence))*100

### 8.14.2. Results

[1005] As shown in FIG. 15, the TBMs containing the variant CD58 domains show comparable cytotoxic activity to a TBM with wild type CD58.

### 8.15. Example 15: T-Cell Activation with TBMs Containing CD58 Variants

[1006] As an alternative to primary T cell activation, a Jurkat-NFAT reporter cell line was used to evaluate the functional activity of the TBMs of Example 13 containing the variant CD58 domains.

### 8.15.1. Materials and Methods

[1007] The Jurkat T cell line (E6-1) was transfected with a NFAT-luciferase reporter construct and a stable, clonal cell line Jurkat cells with NFAT-LUC reporter (JNL), was selected for further characterization based on strong induction of the NFAT reporter following PMA and ionomycin stimulation.

[1008] The Jurkat reporter cell line for was used for determination of non-specific activation of NFAT.

[1009] Purified TBMs were tested for their potential to induce NFAT activation in the absence of target cells.

[1010] Jurkat cells with NFAT-LUC reporter (JNL) were grown in RPMI-1640 media containing 2 mM glutamine and 10% fetal bovine serum with puromycin at 0.5 ug/ml. 100,000 JNL cells per well were plated in a flat-bottom 96-well plate and were incubated with serial dilutions of the TBMs and controls. After an incubation of 6 hr at 37° C., 5% CO2, OneGlo luciferase substrate (Promega #E6120) was added to the plate. Luminescence was measured on an Envision plate reader after a 10 minute incubation.

### 8.15.2. Results

[1011] As shown in FIG. 16, the TBMs containing the variant CD58 domains show tumor-independent (i.e., non-target cell specific) activation levels comparable to or lower than TBMs containing wild type CD58. 8.16. Example 16: CD19 and CD58 expression on various cell lines 8.16.1. Materials and Methods

[1012] Cell surface expression of CD19 and CD58 was determined on OCI-LY-19 (a human B-cell non-Hodgkin lymphoma cell line), Karpas-422 (a human B-cell non-Hodgkin lymphoma cell line), Toledo (a human B-cell non-Hodgkin lymphoma cell line), and Nalm-6 (B cell precursor leukemia cell line) cell lines by flow cytometry using APC labelled anti-CD19 (Biolegend, Cat #302212) and APC-labelled anti-CD58 (Biolegend, Cat #330918) and respective isotype control antibodies. The samples were run on BD LSR Fortessa and analyzed using FlowJo.

### 8.16.2. Results

[1013] The cell lines have different level of CD19 and CD58 expression (FIGS. 17A-H). The ranking for CD19 expression among the cell lines was OCI-LY-19>Karpas 422>Toledo=Nalm-6. The ranking for CD58 expression was OCI-LY-19>Nalm-6>Karpas=Toledo.

### 8.17. Example 17: RTCC and Cytokine Secretion Activity of the NEG258-Based TBMs Vs. A One-Arm BBM that does not Bind to CD2 and a TBM that does not Bind to CD19

[1014] CD3hi TSP1, CD3med TSP1, CD3 hi BSP1, and CD3hi TSP1C (H variants) were compared for their potential to induce T cell-mediated apoptosis in Karpas422 target cells.

### 8.17.1. Materials and Methods

[1015] An RTCC assay with huCD19-expressing Karpas422 target cells was performed according to the Materials and Methods described in Example 9, but with a final E:T ratio of 1:1 and a 96 hour incubation.

### 8.17.2. Results

[1016] As shown in FIGS. 18A-18B, CD3hi TSP1, CD3med TSP1, and CD3hi BSP1 show cytotoxic activity against Karpas422 target cells, with CD3hi TSP1 having the highest cytotoxic activity.

### 8.18. Example 18: Cytokine Release Assay

[1017] CD3hi TSP1, CD3med TSP1, CD3 hi BSP1, and CD3hi TSP1C (H variants) were analyzed for their ability to induce T cell-mediated de novo secretion of cytokines in the presence of Karpas422 cells.

### 8.18.1. Materials and Methods

[1018] A cytokine release assay was performed as in Example 10, but with Karpas422 cells at a final E:T ratio of 1:1 and an incubation of 48 hours.

### 8.18.2. Results

[1019] As shown in FIGS. 19A-19F, CD3hi TSP1, CD3med TSP1, and CD3hi BSP1 induced cytokine secretion by T cells, with CD3hi TSP1 inducing the highest levels of cytokine secretion, followed by CD3med TSP1, which was similar to CD3hi BSP1.

### 8.19. Example 19: TBM and BBM Binding to T Cells

[1020] Binding of CD3hi TSP1, CD3med TSP1, CD3hi BSP1, and CD3hi TSP1C (H variants) to T cells was evaluated using flow cytometry.

### 8.19.1. Materials and Methods

[1021] Peripheral blood mononuclear cells (PBMCs) previously isolated and cryopreserved from 2 Leukopak donors (Hemacare) were thawed and Pan T cells were isolated by negative selection using the Pan T cell Isolation Kit, human (Miltenyi Biotec, Cat #130-096-535) following the manufacturer's protocol. T cells were resuspended in FACS Buffer and 100,000 cells were added to each well of a 96 well round bottom plate. A dilution series of CD3med TSP1, CD3hi TSP1, CD3hi BSP1, and CD3hi TSP1C ranging from 33 μg/ml-0.005 μg/ml was added to cells and incubated on ice for 1 hour. Cells were washed twice, resuspended in 100 pl of anti-human IgG secondary antibody and incubated on ice for another hour. After the incubation, cells were washed twice, resuspended in 100 pl of fixable viability dye and incubated on ice for 30 min. After washing twice again, cells were resuspended in 120 pl of FACS buffer. The cells were then run on BD LSR Fortessa and data was analyzed using FlowJo to determine the MFI of anti-human IgG secondary antibody, which was plotted against antibody concentration.

### 8.19.2. Results

[1022] All antibodies showed different degree of binding to T cells (FIG. 20). CD3hi TSP1 was the strongest binder followed by CD3med TSP1, with BSP1 being the weakest binder. Without being bound by theory, it is believed that the improved binding of the TBMs can be attributed to co-engagement of CD2 and CD3 arms, thereby increasing the binding avidity to T cells.

### 8.20. Example 20: TBM and BBM Mediated T Cell Proliferation

[1023] CD3hi TSP1, CD3med TSP1, CD3hi BSP1, and CD3hi TSP1C (H variants), and blinatumomab were evaluated for their ability to induce T cells proliferation upon co-culture with CD19 expressing OCI-LY-19, Karpas422, and Toledo target cells.

### 8.20.1. Materials and Methods

[1024] Briefly, OCI-LY-19, Karpas422, and Toledo target cells stably expressing firefly luciferase were plated in a 96 well plate in T Cell Media (TCM) (RPMI-1640, ThermoFisher Scientific, Cat #11875-085), 10% FBS (Seradigm, Cat #1500-500), 1% L-Glutamine (Thermo Fisher Scientific, Cat #25830-081), 1% Non Essential Amino Acids (Thermo Fisher Scientific, Cat #11140-050),1% Pen/Strep (Thermo Fisher Scientific, Cat #15070063), 1% HEPES (Thermo Fisher Scientific, Cat #15630080), Sodium Pyruvate (Thermo Fisher Scientific, Cat #11360-070), 0.1% Beta-mercaptoethanol (Thermo Fisher Scientific, Cat #21985-023)]. PBMCs previously isolated and cryopreserved from 2 Leukopak donors were thawed and Pan T cells were isolated (as described earlier). Isolated T cells were labelled with 5 μM Cell Trace Violet (CTV) (Thermo Fisher Scientific, Cat #C34557) following the manufacturer's protocol and were co-cultured with target cells at an E:T ratio of 1:3. A dilution series of CD3med TSP1, CD3hi TSP1, CD3hi BSP1, CD3hi TSP1C, and blinatumomab ranging from 2.5 nM-0.0006 nM was added to cells and the plates were incubated in a 5% CO2, 37° C. incubator for 96 hrs. After incubation, the cells were harvested, treated with Human TruStain FcX (Fc Block) (Biolegend, Cat #422302) and stained with Fixable Viability Dye eFlour 780 (ThermoFisher Scientific, Cat #65-0865-14), followed by staining with PerCP-Cy5.5 conjugated anti-human CD3 mAb (Biolegend, Cat #317336). All staining steps were performed according to manufacturer's protocol. Flow analysis were performed using BD LSR Fortessa and FlowJo software to 2% determine % proliferated CD3+ T cells based on CD3 staining and dilution of Cell Trace Violet dye.

### 8.20.2. Results

[1025] All CD19 targeting antibodies induced proliferation of T cells upon co-culture with different CD19 expressing target cell lines (FIGS. 21A-21C). The T cell proliferation effect was dose-dependent, and CD3hi TSP1 showed more potent activity than CD3med TSP1 and CD3hi BSP1. The control antibody did not induce any T cell proliferation indicating that CD19 target-specific engagement was required for the proliferation of T cells. Blinatumomab mediated the most potent T cell proliferation in the presence of OCI-LY-19 and Toledo cells. In the presence of Karpas420, CD3hi TSP1 more effectively induced T cell proliferation as shown by the maximum percentage of proliferated T cells.

### 8.21. Example 21: RTCC Activity of NEG258-Based TBMs with Different CD3 Affinities Vs. A BBM and Blinatumomab

[1026] The NEG258-based TBMs containing CD3 binding arms with different affinities (CD3hi TSP1 and CD3med TSP1 (H variants)) and a BBM (CD3hi BSP1 (H variant)) were compared for their potential to induce T cell-mediated apoptosis in Karpas422 target cells. The study also included blinatumomab as a control.

### 8.21.1. Materials and Methods

[1027] An RTCC assay with huCD19-expressing Karpas422 target cells was performed according to the Materials and Methods described in Example 9, but with a final E:T ratio of 1:1 and a 96 hour incubation.

### 8.21.2. Results

[1028] As shown in FIGS. 22A-22B, both types of TBMs show cytotoxic activity against Karpas422 cells. The TBMs demonstrated superior cytotoxic activity compared to the BBM. CD3hi TSP1 showed similar or superior cytotoxic activity compared to blinatumomab.

### 8.22. Example 22: RTCC Activity of NEG258-Based TBMs with Different CD3 Affinities Vs. A BBM and TBMs that do not Bind to CD19 Against Multiple B Cell Lymphoma Cell Lines

[1029] CD3hi TSP1, CD3med TSP1, CD3hi BSP1, and CD3hi TSP1C (H variants) were compared for their potential to induce T cell-mediated apoptosis in Oci-Ly19, Toledo, Nalm6, Nalm6 KO and K562 target cells. Oci-Ly19, Toledo, Nalm6 cells express hCD19 antigen. Nalm6 KO and K562 target cells lacking hCD19 expression were used to assess target-independent killing. The study also included blinatumomab as a control.

### 8.22.1. Materials and Methods

[1030] Nalm6 KO was generated from Nalm6 parental cell line by using CRISPR-CAS9 technology and was confirmed to lack hCD19 expression. Oci-Ly19, Toledo, Nalm6, Nalm6 KO and K562 target cells were engineered to overexpress firefly luciferase. RTCC assays were performed with the different cells lines according to the Materials and Methods described in Example 9, but with a final E:T ratio of 1:1 and a 48 hour incubation.

### 8.22.2. Results

[1031] CD3hi TSP1 and CD3med TSP1 showed cytotoxic activity against Oci-Ly19, Toledo and Nalm6, but showed minimal activity against antigen-negative Nalm6 KO and K562 (FIGS. 23A-23J). The TBMs demonstrated superior cytotoxic activity compared to the BBM. CD3hi TSP1 showed comparable cytotoxic activity to blinatumomab.

### 8.23. Example 23: Cytokine Release Assay of the NEG258-Based TBMs with Different CD3 Affinities Vs. A BBM and TBMs that do not Bind to CD19 Against Multiple B Cell Lymphoma Cell Lines

[1032] CD3hi TSP1, CD3med TSP1, CD3hi BSP1 and CD3hi TSP1C (H variants) were compared for their potential to induce T cell-mediated de novo secretion of cytokines in Oci-Ly19, Toledo, Nalm6, Nalm6 KO and K562 target cells. Oci-Ly19, Toledo, Nalm6 cells express hCD19 antigen. Nalm6 KO and K562 target cells that lack hCD19 expression were used to assess target-independent cytokine release. The study also included blinatumomab as a control.

### 8.23.1. Materials and Methods

[1033] Target cells were harvested and resuspended in RPMI medium (Invitrogen #11875-093) with 10% FBS. 5,000 target cells per well were plated in a flat-bottom 384-well plate. Human pan T effector cells were isolated via negative selection (Stemcell Technologies #17951) from two donors from cryopreserved PBMCs that were separated from a leukopak (Hemacare #PB001F-1) by Ficoll density gradient centrifugation. Purified T cells were then added to the plate to obtain a final E:T ratio of 1:1. After an incubation of 48 hr at 37° C., 5% CO2, the supernatants were harvested for subsequent analysis. A multiplexed ELISA was performed according to the manufacturer's instructions using a human cytokine custom 3-plex 384 4-spot kit (MesoScale Discovery #N311B-1).

### 8.23.2. Results

[1034] As shown in FIGS. 24A-24J, both NEG258-based TBMs induce significant cytokine secretion by T cells in a dose-dependent manner when incubated with Oci-Ly19, Toledo and Nalm6 cells. Minimal cytokine secretion was detected when incubating with antigen-negative Nalm6 KO and K562.

### 8.24. Example 24: Re-Challenge RTCC Assay with Karpas 422 & OCI-LY-19 Cell Lines

[1035] The effect of target cell re-challenge on the killing activity of CD3hi TSP1 (H variant), CD3med TSP1 (H variant), CD3hi BSP1 (H variant), and blinatumomab treated T cells was determined using a dose titration re-challenge RTCC assay.

### 8.24.1. Materials and Methods

[1036] OCI-LY-19 and Karpas422 target cells stably expressing firefly luciferase were plated in a Costar 6 well plate in T Cell Media (TCM). PBMCs previously isolated and cryopreserved from 2 Leukopak donors were thawed and Pan T cells were isolated (as described earlier). A co-culture of T cells and OCI-LY-19 or Karpas 422 cells at E:T ratio of 1:1 along with EC90 concentration (0.1 nM for OCI-LY-19 and 0.5 nM for Karpas 422) of CD3med TSP1, CD3hi TSP1, CD3hi BSP1, and blinatumomab was set-up. The plates were incubated for 4 days for OCI-LY-19 and 5 days for Karpas 422 cells. At the end of incubation, the killing of target cells was determined using the luminescence signal. The absolute T cell counts from each antibody treated condition was also determined. For the next round of rechallenge, it was ensured that the killing of target cells was equivalent across various antibody conditions. The T cell counts were normalized across different antibody conditions and another round of a single concentration rechallenge was set-up at E:T of 1:1 using the EC90 concentration with a 4 day incubation for both target cells. Additionally, a dose titration RTCC at a E:T of 1:1 and a concentration range of 2 nM-0.000001 nM was set-up using T cells from the different antibody treated conditions with a 4 day incubation used for each cell line. The killing of target cells was determined using the luminescence signal to generate dose response curves. At the end of the challenge, the above process was repeated once more for Karpas 422 and twice more for OCI-LY-19 cells. The assay set-up is shown in FIG. 25A.

### 8.24.2. Results

[1037] As can be seen from FIGS. 25B-25H, CD3hi TSP1 was able to better retain killing ability upon repeated challenges with the target cells compared to CD3med TSP1, and CD3hi TSP1. CD3med TSP1 was the next best, with CD3hi BSP1 being the least active of all antibodies. CD3hi TSP1 demonstrated similar activity when compared to Blinatumomab in the first 2 or 3 rounds of re-challenges for Karpas422 and OCI-LY-19 cells, respectively. At the last re-challenge for OCI-LY-19, CD3hi TSP1 mediated more potent RTCC than blinatumomab (both in EC50 and maximum lysis), whereas for Karpas422, blinatumomab mediated higher maximum lysis than CD3hi TSP1 despite a similar EC50.

### 8.25. Example 25: Re-Challenge T Cell Phenotyping with Karpas 422 & OCI-LY-19 Cell Lines

[1038] The effect of target cell re-challenge on the phenotype of CD3hi TSP1, CD3med TSP1, and CD3hi BSP1 (H variants) treated T cells was determined using a single concentration re-challenge assay.

### 8.25.1. Materials and Methods

[1039] OCI-LY-19 and Karpas422 target cells stably expressing firefly luciferase were plated in a Costar 6 well plate in T Cell Media (TCM). PBMCs previously isolated and cryopreserved from 2 Leukopak donors were thawed and Pan T cells were isolated (as described earlier). Co-cultures of T cells and OCI-LY-19 or Karpas 422 cells at E:T ratio of 1:1 was set-up and 1 nM of CD3hi BSP1, CD3med TSP1, or CD3hi TSP1 was added. The plates were incubated for 4 days for OC-LY-19 and 5 days for Karpas 422 cells. At the end of incubation, the killing of target cells and absolute T cell counts from each antibody treated condition was determined. The T cell counts were normalized across different antibody conditions and two additional rounds of re-challenges were set-up the same way as the previous challenge with a 4 day incubation for both target cells, for a total of three challenges. After the third challenge, T cells from different antibody treated conditions were harvested on day 2 from the Karpas 422 co-cultures and on day 4 from OCI-LY-19 co-cultures and split into 2 fractions. One fraction was stained with blue fixable viability dye (ThermoFisher Scientific, Cat #L23105) prior to staining with a cocktail of anti-human CD3 (Biolegend, Cat #317324), CD4 (Biolegend, Cat #344608), CD8 (BD Biosciences, Cat #563795), CD27 (Biolegend, Cat #356412) & CD62L mAb (Biolegend, Cat #304814). The second fraction was resuspended to 1e6/ml in TCM and stimulated with Cell Stimulation Cocktail (Tonbo Biosciences, Cat #TNB4975) for 4 hrs at 37° C. Thereafter the cells were washed and sequentially stained with blue fixable viability dye (ThermoFisher Scientific, Cat #L23105), a cocktail of anti-human CD3 (Biolegend, Cat #317324), CD4 (Biolegend, Cat #344608), CD8 (BD Biosciences, Cat #563795), followed by permeabilization using the FoxP3 transcription factor staining set (ThermoFisher Scientific, Cat #00-5523-00) and final staining with anti-human IFNγ mAb (Biolegend, Cat #400134) and IL-2 mAb (Biolegend, Cat #400551) or respective isotype controls. All stainings were performed according to manufacturer's protocol. Flow analyses were performed using BD LSR Fortessa and FlowJo software.

### 8.25.2. Results

[1040] As shown in FIGS. 26A-26H (Karpas 422 model) and FIGS. 261-26P (OCI-LY-19 model), CD3hi TSP1 better promoted enrichment of younger phenotype of T cells than CD3med TSP1 and CD3hi BSP1. CD3hi TSP1 was also able to induce better cytokine production from the T cells compared to the other CD19 binders tested.

### 8.26. Example 26: Ability of CD3hi TSP1 vs. CD3hi BSP1 to Elicit T Cell Proliferation and Cytokine Production in Presence of CD19+ Target Cells

[1041] CD3hi TSP1 and CD3hi BSP1 (R variants) were evaluated for their ability to induce T cell proliferation, cytokine production and changes in T cells' surface markers expression, upon co-culture with CD19-expressing Nalm6 target cells.

### 8.26.1. Materials and Methods

[1042] Nalm-6 target cells stably expressing firefly luciferase were irradiated at 50 Gy on the day of the assay set up. Peripheral blood mononuclear cells (PBMCs) previously isolated from buffy coat donors (Bern Hospital) and cryopreserved were thawed and total T cells were isolated by negative selection using the human Pan T cell Isolation Kit (Miltenyi Biotec, Cat #130-096-535) following the manufacturer's protocol. The positive fraction (called PBMCs-T cells depleted) was irradiated at 50 Gy in order to be used as feeder for the co-culture. From the negative fraction, enriched in total T cells, CD8⁺ T cells were isolated by an additional step of negative selection using EasySep™ Human CD8+ T Cell Enrichment Kit (Stem Cell, Cat #19053). Untouched CD8 cells were then stained with an anti-CD28 antibody (Biolegend, Cat #302922) and sorted with a FACSAria (BD) according to CD28 expression: CD8⁺CD28⁺ and CD8⁺CD28⁻. The purity of sorted cells was >95%.

[1043] After sorting, T cells were labelled with 2.5 μM of Carboxyfluorescein succinimidyl ester (CFSE, Thermo Scientific, Cat #C34554) following the manufacturer's protocol.

[1044] Each T cell subset (either CD8⁺CD28⁺ or CD8⁺CD28⁻) of CFSE-labelled T cells was co-cultured with Nalm6 target cells, seeding 50,000 T cells and 50,000 target cells to achieve an effector: target (E:T) ratio of 1:1. Cells were diluted and co-plated to obtain additional final E:T ratio of 1:3 or 1:6.

[1045] In the co-culture conditions where the presence of irradiated PBMCs-T cells depleted was required, 10,000 PBMCs were plated to obtain a 5:1 ratio, effector T cells: PBMCs.

[1046] The T cells-tumor cells co-culture was plated in a Costar 96 well plate (Corning, Cat #3585) in T Cell Media [RPMI-1640 (ThermoFisher Scientific, Cat #21875-034); 10% FBS HyClone (GE healthcare, Cat #SH30070.03); 1% Non Essential Amino Acids (Thermo Fisher Scientific, Cat #11140-050); 1% Pen/Strep (Thermo Fisher Scientific, Cat #15140122); 1% HEPES (Lonza, Cat #17737E); Sodium Pyruvate (Thermo Fisher Scientific, Cat #11360-070); 50 μM Beta-mercaptoethanol (Thermo Fisher Scientific, Cat #31350)].

[1047] CD3hi TSP1 and CD3hi BSP1, diluted in T cell Media, were added to the cells at different concentrations (1 nM, 0.1 nM and 0.01 nM) and incubated in a 5% CO2, 37° C. incubator for 72 hrs. In order to be able to detect intracellular cytokines production, plates were incubated for the last 1.5 hrs of the co-culture with PMA (50 ng/ml; SIGMA, Cat #P1585)). lonomycin (500 μg/ml; Calbiochem, Cat #407950); brefeldin (10 μg/ml; Cell Signaling, Cat #9972) was also added for the last 1.5 hours of the incubation.

[1048] At the end of the 72 hrs, cells were harvested and then stained with a viability die, Zombie Aqua (Biolegend, Cat #423102) by incubating at room temperature, for 10 mins. Cells were then washed twice using FACS Buffer and stained with antibodies against surface markers: anti-CD2 (Biolegend, Cat #300214), anti-CD28 (Biolegend, Cat #302922), anti-CCR7 (Biolegend, Ca #353226), and anti-CD45RO (Biolegend, Cat #304216). Intracellular IFN-g and granzyme B (GzB) were detected by treating T cells with BD cytofix cytoperm kit (BD, Cat #555028) according to the manufacturer's instructions, and staining them with anti-IFNg (Biolegend, Ca #502509) and anti-granzyme B antibodies (BD, Ca #560213). Samples were washed with FACS buffer and acquired on a BD LSR Fortessa (BD). Analysis was performed with FLOWJO software (version 10.6.0; Tree Star Inc.).

### 8.26.2. Results

[1049] Both CD3hi TSP1 and CD3hi BSP1 induced proliferation of both CD28⁺ and CD28⁻ T cells upon co-culture with CD19 expressing target cell line Nalm6 (FIGS. 27A-27D). However, CD3hi TSP1 was more potent in inducing proliferation of both T cells subsets compared to CD3hi BSP1. The effect was observed at both concentrations tested and at the different E:T ratios used. The effect on T cell proliferation was observed both in presence or absence of irradiated PBMCs.

[1050] In presence of 1 nM of CD3hi BSP1, no major differences were observed in terms of percentage of T cells producing IFN-g or granzyme B (GzB); however, in presence of CD3hi TSP1 there was a clear shift in the median fluorescence intensity (MFI) for both cytokines, indicating an increase in the expression of both IFNg and GzB, in particular among the CD28⁻ T cells when co-cultured in presence of irradiated PBMCs (FIGS. 28A-28D). The effect of CD3hi TSP1 on cytokines producing-T cells is even more pronounced at 0.1 nM: both in presence and absence of irradiated PBMCs there was a clear increase in GzB⁺ T cells and IFNg⁺ T cells both within CD28− and CD28+ T cell subsets, as MFI (FIGS. 28E-28H). Moreover, the proportion (%) of CD28⁻ T cells IFNg⁺GzB⁺ was also more pronounced in presence of CD3hiTSP1 (FIGS. 281-28L).

[1051] The combination of the expression profile of CD45RO and CCR7 define the distribution of the different T cell populations: naive (CD45RO⁻CCR7⁺), central memory (CM) (CD45RO⁺CCR7⁺), effector memory (EM) (CD45RO⁺CCR7⁻) and the terminally differentiated (TEMRA) (CD45RO⁻CCR7⁻). Changes in the T cell surface phenotype are shown in FIG. 29. There was no major effect of the CD3hi molecules on the CD28⁺ cells that maintain the homogenous distribution of the different T cells populations, observed right after sorting, also after 72 hrs of co-culture. Conversely, there was an effect of CD3hi TSP1 on CD28⁻ cells: while after sorting CD28⁻ cells showed almost entirely a TEMRA phenotype, after 72 hrs treatment with CD3hiTSP1 CD28⁻ cells re-acquired a central memory/effector memory phenotype with a concomitant decrease in the proportion of cells with a more terminally differentiated (TEMRA) profile.

### 8.27. Example 27: Ability of CD3hiTSP1 vs. CD3hi BSP1 Molecules to Elicit Redirected T-Cell Cytotoxic Activity (RTCC) Against CD19+ Target Cells

[1052] An RTCC assay was set up with CD19+ Nalm6 cells, engineered to express the luciferase gene, and sorted CD8 T cells populations to measure the ability of CD3hi TSP1 and CD3hi BSP1 (R variants) to elicit cytotoxic activity of CD8 T cells subsets.

### 8.27.1. Materials and Methods

[1053] Peripheral blood mononuclear cells (PBMCs) previously isolated from buffy coat donors (Bern Hospital) and cryopreserved were thawed and total T cells were isolated by negative selection using the Pan T cell Isolation Kit, human (Miltenyi Biotec, Cat #130-096-535) following the manufacturer's protocol. The positive fraction (called PBMCs-T cell depleted) was irradiated at 50 Gy in order to be used as feeder in the co-culture.

[1054] From the negative fraction, enriched in total T cells, CD8⁺ T cells were then isolated by an additional step of negative selection using EasySep™ Human CD8+ T Cell Enrichment Kit (Stem Cell, Cat #19053). Untouched CD8⁺ cells were then stained with an anti-CD28 antibody (Biolegend, Cat #302922) and sorted with a FACSAria (BD) according to the CD28 expression: CD8⁺CD28⁺ and CD8⁺CD28⁻. The purity of th sorted cells was >95%.

[1055] Each T cell subset (either CD8⁺CD28⁺ or CD8⁺CD28⁻) was then co-cultured in a 384-well flat-bottom microtiter plate (ThermoFisher Scientific, Cat #142761) with equivalent number of Nalm6 target cells to achieve an effector target (E:T) ratio of 1:1 (3,000 T cells and 3,000 Target cells). The co-culture was set up in T Cell Media [RPMI-1640 (ThermoFisher Scientific, Cat #21875-034), 10% FBS HyClone (GE healthcare, Cat #SH30070.03), 1% Non Essential Amino Acids (Thermo Fisher Scientific, Cat #11140-050),1% Pen/Strep (Thermo Fisher Scientific, Cat #15140122), 1% HEPES (Lonza, Cat #17737E), Sodium Pyruvate (Thermo Fisher Scientific, Cat #11360-070), 50 μM Beta-mercaptoethanol (Thermo Fisher Scientific, Cat #31350)]. Cells were diluted and co-plated to obtain additional final E:T ratio of 1:3 or 1:6. In the co-culture conditions where the presence of irradiated PBMCs-T cells depleted was required, 600 PBMCs were plated to obtain a 5:1 ratio, effector T cells: PBMCs.

[1056] CD3hi TSP1, CD3hi BSP1 and CD3hi TSP1C antibody control were added to the cells at different concentrations (1 nM, 0.1 nM and 0.01 nM).

[1057] Plates were incubated in a 37° C. incubator with 5% CO2 for 72 hrs. Following the co-incubation, One-Glo (Promega, catalog #E6110) was added to all wells and the luminescence signal was subsequently measured on an ELISA Reader 4.18 1 (Biotek, Synergy H1). Target cells with One-Glo served as maximal signal. The percent RTCC of target cells was calculated using the following formula: [100−(sample/maximal signal)*100%].

### 8.27.2. Results

[1058] Results are shown in FIGS. 30A-30D. Both CD3hi TSP1 and CD3hi BSP1 mediated RTCC activity against CD19+ Nalm6-luc target cells when compared to the control antibody CD3hi TSP1C. When 0.1 nM or 1 nM of CD3hi TSP1 was used, an increase in the CD3hi TSP1-mediated RTCC was observed in the settings with CD8⁺CD28⁻ T cells (in presence of irradiated feeder) compared to the other treatments.

### 8.28. Example 28: Anti-Tumor Activity of CD3hi TSP1 and CD3med TSP1 in an Adoptive Transfer Adaptation of the OCI-LY-19 Diffuse Large B-Cell Lymphoma Tumor Model in NSG Mice

[1059] The anti-tumor activity of CD3hi TSP1 and CD3med TSP1 (H variants) were studied in an OCI-LY-19 diffuse large B-cell lymphoma (DLBCL) tumor model in NSG mice.

### 8.28.1. Materials and Methods

[1060] On Day 0, OCI-LY-19 cells were harvested and suspended in Hanks Balanced Salt Solution (HBSS) at a concentration of 500×10⁶ cells/mL. Female NOD.Cg-Prkdcscid Il2rgtm1Wjl/SzJ mice (NSG mice) at ˜6 weeks old (Jackson Laboratories, ME) were injected with 5×10⁶ OCI-LY-19 cells in 200 μL subcutaneously on the right flank. Seven days following tumor inoculation, each mouse received an adoptive transfer (AdT) of 15×10⁶ of peripheral blood mononuclear cells (PBMCs) in 100 μL via IV injection in the lateral tail vein. The PBMCs were previously isolated from a human leukopak, frozen and stored in Cryostor10 media in vapor phase liquid nitrogen tank until use. Immediately prior to AdT, PBMCs were thawed and suspended at a concentration of 100×10⁶ cells/ml in Hanks Balanced Salt Solution (HBSS). When tumor burden (TB) reached an average of ˜200 mm³ volume measured via mechanical caliper, mice (n=8/group) were treated with a single IV administration of CD3hi TSP1 or CD3med TSP1 at dose levels 0.003 mg/kg, 0.01 mg/kg, 0.03 mg/kg, 0.1 mg/kg or 0.3 mg/kg. Anti-tumor activity of each antibody was compared to an untreated control group that received tumor implant and AdT but no treatment (tumor+AdT) (Table 25). The tumor only group was included to meter the allogeneic response observed with untreated control. All treatments were administered at 10 mL/kg according to individual mouse body weights. Anti-tumor activity was determined by percent change in tumor burden vs. change in untreated control (% ΔT/ΔC) or % regression.

[1061] Tumor burden and body weights were recorded twice weekly. Tumor burden was measured by bioluminescence signal intensity in p/s using a bioluminescence imaging system (IVIS200, Perkin Elmer). Anti-tumor activity was determined by % ΔT/ΔC using the formula: 100×ΔTB _{treatment, time}/ΔTB _{control group, time} if ΔTB≥0; or % regression: (−1×(100×(TB _{final-}TB ᵢₙᵢₜᵢₐₗ/TB ᵢₙᵢₜᵢₐₗ) if ΔTV<0. TBᵢₙᵢₜᵢₐₗ is the tumor burden on the day of treatment initiation. % ΔT/ΔC values <42% were considered to have anti-tumor activity. Percent body weight change was determined using the formula: 100×((BWₜᵢₘₑ−BWᵢₙᵢₜᵢₐₗ)/BWᵢₙᵢₜᵢₐₗ). Statistical analysis using One-way ANOVA with Dunnett's multiple comparison test was performed using Graphpad Prism Software, Version. 7.03.

[1062] On day 25 following OCI-LY-19 implantation, all animals from the untreated control group were euthanized due to tumor burden.

### 8.28.2. Results

[1063] This study had minimal allogeneic response (FIGS. 31A-31B).

[1064] Antibody treatment with CD3hi TSP1 at 0.1 mg/kg and 0.3 mg/kg resulted in significant tumor regressions of 72.41% and 84.50%, respectively. Antibody treatment with CD3hi TSP1 at 0.03 mg/kg resulted in tumor regression of 13.74%. Antibody treatment with CD3hi TSP1 at 0.003 mg/kg exhibited significant anti-tumor activity at 1.38% ΔT/ΔC. Antibody treatment with CD3hi TSP1 at 0.003 mg/kg dose level was not active in this model (Table 25; FIG. 31A).

[1065] There was no antibody associated body weight loss with CD3hi TSP1. The body weight change observed with the treatment of CD3hi TSP1 was most likely due to the onset of graft-versus host disease (GvHD). Body weight loss is an endpoint parameter for both disease burden and onset of GvHD. At 35-42 days post-PBMC injection (28-35 days post-tumor implant), animals began to exhibit weight loss attributed to GvHD. Animals with high tumor burden also demonstrated disease-burden associated weight loss. Over the course of the study, body weights increased relative the initial measurement taken on the day of tumor implant (Table 25, FIG. 32A). However at the end of study, the body weight loss observed relative to the peak gain is indicative of GvHD and disease-burden induced weight loss.

[1066] Antibody treatment with CD3med TSP1 resulted in significant anti-tumor responses at 0.1 mg/kg (5.60% regression) and 0.3 mg/kg (36.33% regression). Treatment with CD3med TSP1 resulted in significant anti-tumor responses with % ΔT/ΔC values of 7.39% for the 0.03 mg/kg dose level. Antibody treatment with CD3med TSP1 at 0.003 and 0.01 mg/kg was not active in this model (Table 26; FIG. 31B).

[1067] There was no antibody associated body weight loss with CD3med TSP1. Body weight loss due to the onset of GvHD was not observed for this construct by the end of the study (Table 26, FIG. 32B).

TABLE 25

| | | | Tumor Response | | | Host Response | |
|---|---|---|---|---|---|---|---|
| | | | | | Δ Tumor burden | Δ Body | |
| | | | | | from post-dose | weight from | |
| | | | | Regres- | (mm³) | post-dose (%) | Survival |
| Test | Dose | | ΔT/ΔC | sion | (Mean) | (Mean ± SEM) | (survivors/ |
| agent | (mg/kg) | Schedule | (%) | (%) | Day 25 | Day 25 | total) |
| Tumor | N/A | — | 100 | — | 952.252 | | 5/5 |
| only | | | | | | | |
| Tumor + | N/A | — | 100 | — | 822.216 | | 8/8 |
| AdT | | | | | | | |
| CD3hi | 0.003 | Single | 24.20 | — | 198.9588 | 1.7 ± 1.6 | 8/8 |
| TSP1 | | dose/IV | | | | | |
| CD3hi | 0.01 | Single | 1.38 | — | 11.37875 | −0.7 ± 1.8 | 8/8 |
| TSP1 | | dose/IV | | | | | |
| CD3hi | 0.03 | Single | — | 13.74* | −29.7413 | 1.9 ± 2.0 | 8/8 |
| TSP1 | | dose/IV | | | | | |
| CD3hi | 0.1 | Single | — | 72.41* | −155.988 | 1.2 ± 2.3 | 8/8 |
| TSP1 | | dose/IV | | | | | |
| CD3hi | 0.3 | Single | — | 84.50* | −187.737 | −0.4 ± 1.0 | 7/7** |
| TSP1 | | dose/IV | | | | | |

*p < 0.05, Dunnett's multiple comparison test
**One animal was excluded from the study

TABLE 26

| | | | Tumor Response | | | Host Response | |
|---|---|---|---|---|---|---|---|
| | | | | | Δ Tumor burden | Δ Body | |
| | | | | | from initial | weight from | |
| | | | | Regres- | (mm³) | initial (%) | Survival |
| Test | Dose | | ΔT/ΔC | sion | (Mean) | (Mean ± | (survivors/ |
| agent | (mg/kg) | Schedule | (%) | (%) | Day 25 | SEM) | total) |
| CD3med | 0.003 | Single | 45.36 | — | 372.94 | 4.2 ± 2.1 | 8/8 |
| TSP1 | | dose/IV | | | | | |
| CD3med | 0.01 | Single | 57.13 | — | 469.6988 | 5.7 ± 2.7 | 8/8 |
| TSP1 | | dose/IV | | | | | |
| CD3med | 0.03 | Single | 7.39 | — | 60.7375 | 2.6 ± 1.6 | 8/8 |
| TSP1 | | dose/IV | | | | | |
| CD3med | 0.1 | Single | — | 5.60* | −12.1488 | 3.3 ± 2.0 | 8/8 |
| TSP1 | | dose/IV | | | | | |
| CD3med | 0.3 | Single | — | 36.33* | −78.7388 | 3.54 ± 1.4 | 8/8 |
| TSP1 | | dose/IV | | | | | |

*p < 0.05, Dunnett's multiple comparison test

### 8.29. Example 29: Anti-Tumor Activity Following Multiple Doses of CD3 TSP1, CD3hi BSP1 and CD3med TSP1 in the OCI-LY-19 in the Adaptation of a DLBCL Subcutaneous Tumor Model in huCD34+ NSG Mice

[1068] The anti-tumor activity of CD3hi TSP1, CD3hi BSP1, and CD3med TSP1 (H variants) were studied in an OCI-LY-19 DLBCL subcutaneous tumor model in huCD34+ NSG mice.

### 8.29.1. Materials and Methods

[1069] The process of humanization of NGS mice used in this study is shown schematically in in FIG. 33. Briefly, female NSG mice at ˜6 weeks old (Jackson Laboratories, ME) underwent a preconditioning protocol to depopulate the bone marrow niche. This was accomplished by either chemical ablation or by X-ray irradiation to allow for reconstitution of a human immune system in each NSG mouse. Within twenty-four hours following preconditioning, 50,000 huCD34+ stem cells (huCD34+SC) isolated from single umbilical cords (Lonza, StemCell) were introduced in 100 μL via IV injection in the lateral tail vein. Each mouse received huCD34+SC from a single donor. The huCD34+SC were received frozen and stored in a −200° C. liquid nitrogen tank until use. Immediately prior to inoculation, huCD34+SC vials were removed from the liquid nitrogen tank, thawed in a bead-bath at 37° C. and re-suspended in PBS at a final concentration of 500,000 cells/mL. For sixteen weeks post humanization, mice were monitored weekly for body weights and body condition. At week 16, mice were bled via the tail and human immune reconstitution (human engraftment) was ascertained by fluorescent activated cell sorting (FACS). Mice with a 25% hCD45/total CD45 were considered stably engrafted and were eligible for study enrollment.

[1070] Following engraftment assessment, mice were implanted with tumor cells subcutaneously. On Day 0, OCI-LY-19 cells were harvested and suspended in Hanks Balanced Salt Solution (HBSS) at a concentration of 10×10⁷ cells/mL and then diluted 1:1 with matrigel to give a final concentration of 5×10⁷ cells/mL. Mice were implanted via subcutaneous (SQ) injection on the right flank with 5×10⁶ cells/mouse in 100 μL volume. Fifteen days post implant (mean tumor volume ˜250-300 mm³ measured via calipers), mice were randomized on two parameters: donor and tumor volume. This ensured equal distribution of donors and comparable tumor volumes in each group. There were 3 treatment groups, n=8, and untreated control, n=5. Mice were treated weekly for 2-4 weeks via IV administration with CD3hi TSP1 (0.3 mg/kg), CD3med TSP1 (1.0 mg/kg), or CD3hi BSP1 (0.3 mg/kg). Anti-tumor activity of each antibody was compared to an untreated huCD34⁺ SC control group that received tumor implant (tumor+CD34+) (Table 27). All treatments were administered at 10 mL/kg according to individual mouse body weights. Anti-tumor activity was determined by percent change in tumor volume of treated vs. untreated control (% ΔT/ΔC) or % regression and durability of response was evaluated by monitoring % surviving animals over time. Animals whose TV, BW or BCS (body condition score) that reached end point criteria by exceeding limits provisioned in the lab's animal use protocol (AUP) were euthanized.

[1071] Tumor burden (TV) and body weights were recorded twice weekly. Tumor burden was measured by calipers, capturing length and width, and the tumor volume was calculated using the formula (w²×L)/3.14. Body weight was measured by scale. Both parameters were entered into an in-house system (INDIGO). Anti-tumor activity was determined by % ΔT/ΔC using the formula: 100×ΔTB _{treatment, time}/ΔTB _{control group, time} if ΔTB≥0; or % regression: (−1×(100×(TB _{final-}TBᵢₙᵢₜᵢₐₗ/TB ᵢₙᵢₜᵢₐₗ) if ΔTV<0. TBᵢₙᵢₜᵢₐₗ is the tumor burden on the day of treatment initiation. % ΔT/ΔC values <42% were considered to have anti-tumor activity. Percent body weight change was determined using the formula: 100×((BWₜᵢₘₑ−BWᵢₙᵢₜᵢₐₗ)/BWᵢₙᵢₜᵢₐₗ). Statistical analysis using One-way ANOVA with Dunnett's multiple comparison test was performed using Graphpad Prism Software, Version. 7.03 (Day 24 post implant).

[1072] In addition, Time to endpoint was evaluated using KAPLAN-Meyer survival graph and analysis using Graphpad Prism Software, Version. 7.03, and was performed to compare differences in median time to endpoint (TTE). Mice which achieved tumor endpoint when tumor volume exceeded 1200 mm³ and mice euthanized for reasons besides tumor volume related to disease progression, such as ulceration, metastasis, body weight loss or poor body condition were scored as dead (“1”). Animals euthanized for reasons other than tumor progression, such as adverse drug events, were censored (“0”). Log-Rank (Mantel-Cox) survival analysis was performed, and all pairwise multiple comparison procedures were performed using Holm-Sidak method with an overall significance level P<0.05 (SigmaPlot 13.0). Graphical analysis of TTE was performed in Prism (GraphPad v7.03). Individual response criteria were also evaluated and scored as either Complete Response (CR), no detectable tumor at time of last measurement; Partial Response (PR), tumor volume less than baseline measurement at any time point followed by regrowth; or No Response (NR), tumor continues to increase over baseline measurement throughout the study. The last day of the study was captured at Day 39.

[1073] On day 24 following OCI-LY-19 implantation, all animals from the untreated control group were euthanized due to tumor burden. Statistical analysis was evaluated on Day 24.

### 8.29.2. Results

[1074] Treatment with all three antibodies showed significant differences in tumor activity compared to the tumor+CD34⁺ control group. CD3hi TSP1 at 0.3 mg/kg resulted in significant tumor regressions of 47.4% whereas the CD3hi BSP1 did not achieve regressions (16.3% ΔT/ΔC). Treatment with CD3med TSP1 at 1.0 mg/kg resulted in tumor regressions 64.5% (Table 27, FIG. 34A).

[1075] There was treatment associated body weight loss with CD3hi TSP1, CD3med TSP1, and CD3hi BSP1 observed following the first dose only. The severity of body weight loss was impacted by donor as well, with different donors showing variable peak body weight loss. Without being bound by theory, the body weight change observed following the first dose is hypothesized to be target-mediated driven and exacerbated by the depletion of the inherent B cells. Body weight loss is an endpoint parameter for both disease burden and treatment induced responses. Animals with high tumor burden demonstrated disease-burden associated weight loss. Over the course of the study, body weights were observed to increase relative the initial measurement taken on the day of tumor implant, but decrease in response to the progressing disease burden (Table 27, FIG. 34B).

TABLE 27

| | | | | | | Host Response | |
|---|---|---|---|---|---|---|---|
| | | | Tumor Response | | | Δ Body | |
| | | | | | Δ Tumor burden | weight from | |
| | | | | Regres- | from initial (mm³) | initial (%) | Survival |
| Test | Dose | | ΔT/ΔC | sion | (Mean ± SEM) | (Mean ± SEM) | (survivors/ |
| agent | (mg/kg) | Schedule | (%) | (%) | Day 24 | Day 24 | total) |
| Tumor + | N/A | — | — | — | 1733.60 ± 130 | −5.12 ± 4.5 | 5/5 |
| CD34+ | | | | | | | |
| CD3hi | 0.3 | QWx3 | — | 47.4* | −175.93 ± 76.8 | −13.51 ± 2.15 | 8/8 |
| TSP1 | | dose/IV | | | | | |
| CD3hi | 0.3 | QWx3 | 16.25* | | 281.69 ± 292.5 | −5.12 ± 1.7 | 8/8 |
| BSP1 | | dose/IV | | | | | |
| CD3med | 1.0 | QWx3 | — | 64.3* | −215.32 ± 38.48 | −11.30 ± 1.93 | 8/8 |
| TSP1 | | | | | | | |

*p < 0.05, Dunnett's multiple comparisons test

### 8.30. Example 30: Anti-Tumor Activity in a Single Dose, Dose Range Finding Study Comparing CD3hi TSP1 and CD3med TSP1 in a DLBCL Subcutaneous Tumor Model in huCD34+ NSG Mice

[1076] The anti-tumor activity of CD3hi TSP1, CD3hi BSP1, and CD3med TSP1 (H variants) were studied in an OCI-LY-19 DLBCL subcutaneous tumor model in huCD34+ NSG mice.

### 8.30.1. Materials and Methods

[1077] Female humanized CD34+ NOD.Cg-Prkdcscid Il2rgtm1Wjl/SzJ mice (HuNSG mice) were purchased from Jackson Laboratories (Sacramento, CA). Mice were humanized using cord blood.

[1078] The engraftment levels of hCD45+ cells were determined prior to shipment and confirmed in-house prior to the start of the study. HuNSG mice that had over 25% hCD45+ cells in the peripheral blood were considered as engrafted and humanized. HuNSG derived from different donors with different levels of engraftment were randomized into every treatment group in the study.

[1079] Following engraftment assessment, mice were implanted with tumor cells subcutaneously. On Day 0, OCI-LY-19 cells were harvested and suspended in Hanks Balanced Salt Solution (HBSS) at a concentration of 10×10⁷ cells/mL and then diluted 1:1 with matrigel to give a final concentration of 5×10⁷ cells/mL. Mice were implanted via subcutaneous (SQ) injection on the right flank with 5×10⁶ cells/mouse in 100 μL volume. Nine days post implant, (mean tumor volume ˜250-300 mm³ measured via calipers) mice were randomized on two parameters: donor and tumor volume. This ensured equal distribution of donors and comparable tumor volumes in each group. There were 11 groups with n=8 treatment group and n=5 in the untreated control. Mice were administered a single dose via IV administration with CD3hi TSP1 or CD3med TSP1 across the following dose range 1.0 mg/kg, 0.3 mg/gk, 0.1 mg/kg and 0.01 mg/kg. Anti-tumor activity of each antibody was compared to an untreated huCD34⁺ SC control group that received tumor implant (tumor+CD34+) (Table 28). All treatments were administered at 10 mL/kg according to individual mouse body weights. Anti-tumor activity was determined by percent change in tumor volume of treated vs. untreated control (% ΔT/ΔC) or % regression and durability of response was evaluated by monitoring % surviving animals overtime. Animals whose TV, BW or BCS (body condition score) that reached end point criteria by exceeding limits provisioned in the lab's animal use protocol (AUP) were euthanized.

[1080] Tumor burden (TV) and body weights were recorded twice weekly. Tumor burden was measured by calipers, capturing length and width, and the tumor volume was calculated using the formula (w²×L)/3.14. Body weight was measured by scale. Both parameters were entered into an in-house system (INDIGO). Anti-tumor activity was determined by % ΔT/ΔC using the formula: 100×ΔTB _{treatment, time}/ΔTB _{control group, time} if ΔTB≥0; or % regression: (−1×(100×(TB _{final-}TB ᵢₙᵢₜᵢₐₗ) if ΔTV<0. TBᵢₙᵢₜᵢₐₗ is the tumor burden on the day of treatment initiation. (% ΔT/ΔC values <42% were considered to have anti-tumor activity). Percent body weight change was determined using the formula: 100×((BW ₜᵢₘₑ−BW ᵢₙᵢₜᵢₐₗ)/BWᵢₙᵢₜᵢₐₗ). Statistical analysis using One-way ANOVA with Dunnett's multiple comparison test was performed using Graphpad Prism Software, Version. 7.03. In addition, durability of response was evaluated using KAPLAN-Meyer survival graph and analysis using Graphpad Prism Software, Version. 7.03.

[1081] On day 24 following OCI-LY-19 implantation, all animals from the untreated control group were euthanized due to tumor burden. Statistical analysis was evaluated on Day 24.

### 8.30.2. Results

[1082] There was a statistical significant difference in tumor activity observed with the 1.0 mg/kg, 0.3 mg/kg and 0.1 mg/kg doses of CD3hi TSP compared to the tumor+CD34⁺ control group. CD3hi TSP1 at 1.0 mg/kg resulted in significant tumor regressions of 35.3%, whereas CD3hi TSP1 at 0.3 mg/kg and at 0.1 mg/kg showed robust significant anti-tumor activity with ΔT/ΔC values of 0.05% and 19.5%, respectively. The dose levels administered below 0.1 mg/kg did not achieve anti-tumor responses, with the 0.03 mg/kg dose of CD3hi TSP1 having a ΔT/ΔC value of 65.8% and the 0.01 mg/kg dose having a ΔT/ΔC value of 100% (Table 28, FIG. 35A).

[1083] Antibody treatments with CD3med TSP1 resulted in significant anti-tumor activity. CD3med TSP1 dosed at 1.0 mg/kg achieved significant tumor response with a ΔT/ΔC of 0.05%. The 0.3 mg/kg dose level of CD3med TSP1 did show anti-tumor activity (ΔT/ΔC: 26.9<42) but was not significant compared to the control. Doses lower that 0.3 mg/kg did not show significant tumor activity with ΔT/ΔC values of 79.8%, 90.3%, and 100% for 0.1 mg/kg, 0.03 mg/kg and 0.01 mg/kg doses, respectively (Table 28, FIG. 35C).

[1084] There was treatment associated body weight loss observed across multiple dose levels following administration of CD3hi TSP1 and CD3med TSP1. The severity of body weight loss was a combination of both donor and dose level effects, with different donors showing variable peak body weight loss. Without being bound by theory, the body weight change observed following the dose is hypothesized to be target-mediated driven and exacerbated by the depletion of the inherent B cells. Body weight loss is an endpoint parameter for both disease burden and treatment induced responses. Animals with high tumor burden demonstrated disease-burden associated weight loss. Over the course of the study, body weights were observed to increase relative to the initial measurement taken on the day of tumor implant (Table 28, FIGS. 35B and 35D), but decrease in response to the progressing disease burden.

TABLE 28

| | | | | | | Host Response | |
|---|---|---|---|---|---|---|---|
| | | | Tumor Response | | | Δ Body | |
| | | | | | Δ Tumor burden | weight from | Survival |
| | | | | Regres- | from initial (mm³) | initial (% ) | (survivors/ |
| Test | Dose | | ΔT/ΔC | sion | (Mean ± SEM) | (Mean ± SEM) | total) |
| agent | (mg/kg) | Schedule | (%) | (%) | Day 24 | Day 24 | Day 24 |
| Untreated | N/A | — | — | — | 1057. ± 304.2 | 6.02 ± 1.72 | 5/5 |
| control | | | | | | | |
| CD3hi | 1.0 | Single | — | 35.3* | −91.6 ± 13.8 | −1.96 ± 2.31 | 8/8 |
| TSP1 | | dose/IV | | | | | |
| CD3hi | 0.3 | Single | 0.05* | — | −0.57 ± 95.0 | −6.09 ± 2.34 | 8/8 |
| TSP1 | | dose/IV | | | | | |
| CD3hi | 0.1 | Single | 19.5* | — | 205.9 ± 170.6 | −7.06 ± 3.02 | 8/8 |
| TSP1 | | dose/IV | | | | | |
| CD3hi | 0.03 | Single | 65.8 | — | 695.0 ± 168.4 | −3.32 ± 1.63 | 8/8 |
| TSP1 | | dose/IV | | | | | |
| CD3hi- | 0.01 | Single | 100 | — | 1110.7 ± 201.7 | 4.54 ± 2.25 | 8/8 |
| TSP1 | | dose/IV | | | | | |
| CD3med | 1.0 | Single | 0.05* | — | 35.5 ± 57.6 | 3.1 ± 2.5 | 6/8 |
| TSP1 | | dose/IV | | | | | |
| CD3med | 0.3 | Single | 26.9 | — | 284.0 ± 200.9 | −3.0 ± 2.2 | 8/8 |
| TSP1 | | dose/IV | | | | | |
| CD3med | 0.1 | Single | 79.8 | — | 843.2 ± 196.5 | 0.3 ± 2.5 | 8/8 |
| TSP1 | | dose/IV | | | | | |
| CD3med | 0.03 | Single | 90.3 | — | 954.8 ± 180.1 | 4.8 ± 3.7 | 8/8 |
| TSP1 | | dose/IV | | | | | |
| CD3med | 0.01 | Single | 100 | — | 1139.3 ± 155.7 | 12.7 ± 1.8 | 8/8 |
| TSP1 | | dose/IV | | | | | |

*p < 0.05, Dunnett's multiple comparison test

### 8.31. Example 31: Anti-Tumor Activity of CD3hi BSP1, CD3hi TSP1, and CD3med TSP1 in an Adoptive Transfer Adaptation of the Daudi-Luc Burkitt's Lymphoma Subcutaneous Tumor Model in NSG Mice

[1085] The anti-tumor activity of CD31hi BSP1, CD31hi TSP1, and CD3med TSP1 (H variants) were studied in an adoptive transfer adaptation of the Daudi-Luc Burkitt's lymphoma subcutaneous tumor model in NSG mice.

### 8.31.1. Materials and Methods

[1086] On Day 0, Daudi-Luc cells were harvested and suspended in a 1:1 mixture of Hanks Balanced Salt Solution (HBSS) and Matrigel at a concentration of 50×10⁶ cells/mL. Female NSG mice at ˜6 weeks old (Jackson Laboratories, ME) were injected with 5×10⁶ Daudi-Luc cells in 100 μL subcutaneously (SQ) in the right flank. Three days following tumor inoculation, each mouse received an adoptive transfer (AdT) of 15×10⁶ of peripheral blood mononuclear cells (PBMCs) in 100 μL via intravenous (IV) injection in the lateral tail vein. The PBMCs were previously isolated from a human leukopak, frozen and stored in Cryostor10 media in vapor phase liquid nitrogen tank until use. Immediately prior to AdT, PBMCs were thawed and suspended at a concentration of 150×10⁶ cells/ml in Hanks Balanced Salt Solution (HBSS). When tumor volume (TV) reached an average of ˜250 cubic millimeters (mm³) measured via caliper (Day 10 post-implant), mice (n=8/group) were treated with a single IV administration of CD3hi BSP1, CD3hi TSP1, or CD3med TSP1 at dose levels of 1.0 mg/kg, 0.3 mg/kg, or 0.1 mg/kg. Anti-tumor activity of each antibody was compared to an untreated control group that received tumor implant and AdT but no treatment (tumor+AdT) (Table 29). The tumor only group was included to meter the allogeneic response observed with untreated control. All treatments were administered at 10 mL/kg according to individual mouse body weights. Anti-tumor activity was determined by percent change in tumor volume vs. change in untreated control (% ΔT/ΔC) or % regression.

[1087] Tumor volume and body weights were recorded twice weekly. Tumor volume was measured by caliper. Anti-tumor activity was determined by % ΔT/ΔC using the formula: 100×ΔTV _{treatment, time}/ΔTV _{control group, time} if ΔTV≥0; or % regression: (−1×(100×(TV _{final-}TV ᵢₙᵢₜᵢₐₗ/TV ᵢₙᵢₜᵢₐₗ) if ΔTV<0. TVᵢₙᵢₜᵢₐₗ is the tumor volume on the day of treatment initiation. % ΔT/ΔC values <42% were considered to have anti-tumor activity. Percent body weight change was determined using the formula: 100×((BWₜᵢₘₑ−BWᵢₙᵢₜᵢₐₗ)/BWᵢₙᵢₜᵢₐₗ). Statistical analysis using One-way ANOVA with Dunnett's multiple comparison test was performed using Graphpad Prism Software, Version. 7.03.

[1088] On day 36 following Daudi-Luc implantation, 25% of animals from the Tumor+AdT control group were euthanized due to tumor volume.

### 8.31.2. Results

[1089] This study had minimal allogeneic response (FIGS. 36A-36C).

[1090] Antibody treatment with CD3hi BSP1 at 1.0 mg/kg and 0.3 mg/kg resulted in significant tumor regressions of 85.21% and 73.26%, respectively. Antibody treatment with CD3hi BSP1 at 0.1 mg/kg exhibited significant anti-tumor activity (20.89% ΔT/ΔC value). Antibody treatment with CD3med TSP1 resulted in significant anti-tumor responses at all three dose levels: 1.0 mg/kg (90.86% regression), 0.3 mg/kg (85.13% regression), and 0.1 mg/kg (13.51% regression). Antibody treatment with CD3hi TSP1 resulted in significant tumor regressions at all three dose levels: 1.0 mg/kg (90.08% regression), 0.3 mg/kg (91.86% regression), and 0.1 mg/kg (87.52% regression).

[1091] There was no antibody associated body weight loss with any of the three constructs tested. Without being bound by theory, the body weight change observed at approximately Day 35 from baseline was most likely due to the onset of graft-versus host disease (GvHD). Body weight loss is an endpoint parameter for onset of GvHD. At 32-39 days post-PBMC injection (35-42 days post-tumor implant), animals began to exhibit weight loss attributed to GvHD. Over the course of the study, body weights increased relative the initial measurement taken on the day of tumor implant (Table 29, FIGS. 37A-37C). However at the end of study, the body weight loss observed relative to the peak gain is indicative of GvHD-induced weight loss.

TABLE 29

| | | | | | | Host Response | |
|---|---|---|---|---|---|---|---|
| | | | Tumor Response | | | Δ Body | |
| | | | | | Δ Tumor burden | weight from | |
| | | | | Regres- | from initial (mm³) | initial (% ) | Survival |
| Test | Dose | | ΔT/ΔC | sion | (Mean) | (Mean ± SEM) | (survivors/ |
| agent | (mg/kg) | Schedule | (%) | (%) | Day 36 | Day 36 | total) |
| Tumor | N/A | — | 119.42 | — | 1633.79 | 11.653 ± 1.871 | 4/8 |
| only | | | | | | | |
| Tumor + | N/A | — | 100.00 | — | 1368.13 | 8.435 ± 2.241 | 8/8 |
| Adt | | | | | | | |
| (Untreated | | | | | | | |
| Control) | | | | | | | |
| CD3hi | 1.0 | Single | — | 85.21 | −124.67 | 0.296 ± 3.360 | 8/8 |
| BSP1 | | dose/IV | | | | | |
| CD3hi | 0.3 | Single | — | 73.26 | −107.15 | 8.394 ± 6.267 | 8/8 |
| BSP1 | | dose/IV | | | | | |
| CD3hi | 0.1 | Single | 20.89 | — | 285.84 | −0.359 ± 2.569 | 8/8 |
| BSP1 | | dose/IV | | | | | |
| CD3hi | 1.0 | Single | — | 90.08 | −131.77 | 5.423 ± 2.220 | 8/8 |
| TSP1 | | dose/IV | | | | | |
| CD3hi | 0.3 | Single | — | 91.86 | −134.39 | 2.254 ± 2.975 | 8/8 |
| TSP1 | | dose/IV | | | | | |
| CD3hi | 0.1 | Single | — | 87.52 | −128.03 | −0.506 ± 4.777 | 8/8 |
| TSP1 | | dose/IV | | | | | |
| CD3med | 1.0 | Single | — | 90.86 | −132.92 | 3.839 ± 1.597 | 8/8 |
| TSP1 | | dose/IV | | | | | |
| CD3med | 0.3 | Single | — | 85.13 | −124.57 | 3.214 ± 1.737 | 8/8 |
| TSP1 | | dose/IV | | | | | |
| CD3med | 0.1 | Single | — | 13.51 | −19.77 | 0.165 ± 2.561 | 8/8 |
| TSP1 | | dose/IV | | | | | |

### 8.32. Example 32: Design—Selection of Residue Positions

[1092] Design strategies were tested to produce a set of antibodies with modified Fc regions that might exhibit desired properties such as diminished effector functions. Early studies defining key amino acid binding sites on IgG for Fc gamma receptors were performed by mutational analyses, and it was determined that the lower hinge, proximal CH2 region and glycosylation of N297 were critical (Shields et al., 2001). Mutations were introduced into the regions that interact with Fc gamma receptors with the goal to diminish residual binding to Fc gamma receptors. For this particular reason, it was necessary to test various combinations of Fc positions and generate set of mutations without compromising antibody drug developability and immunogenicity risk. Several mutation sets were generated and compared to wildtype IgG1. In Examples 33-36: LALAPA-IgG1 (L234A/L235A/P329A), LALAGA-IgG1 (L234A/L235A/G237A), LALAPG-IgG1 (L234A/L235A/P329G), DAPA-IgG1 (D265A/P329A), LALASKPA-IgG1 (L234A/L235A/S267K/P329A), DAPASK-IgG1 (D265A/P329A/S267K), GADAPA-IgG1 (G237A/D265A/P329A), GADAPASK-IgG1 (G237A/D265A/P329A/S267K) and DANAPA-IgG1 (D265A/N297A/P329A) were evaluated. Previously described DAPA and DANAPA silencing motifs were included for comparison. In Examples 37-: LALA (L234A/L235A), LALASKPA (L234A/L235A/S267K/P329A), GADAPASK (G237A/D265A/P329A/S267K) and DANAPA (D265A/N297A/P329A) mutation sets were evaluated.

### 8.33. Example 33: Expression and Purification of Fc Modified CD3 Antibodies

[1093] For the experiments described below antibodies against CD3 containing the indicated amino acid substitutions and expressed by the nucleotide sequences as indicated, were used as listed in Tables A and B. IgG1 molecules were expressed in HEK293 mammalian cells, and purified using protein A and size exclusion chromatography. In brief, heavy chain and light chain DNA of anti-CD3 WT IgG1 were synthesized at GeneArt (Regensburg, Germany) and cloned into a mammalian expression vector using restriction enzyme-ligation based cloning techniques. All variants described herein were then generated using PCR based mutagenesis. The resulting plasmids were co-transfected into HEK293T cells. For transient expression of antibodies, equal quantities of vector for each chain were co-transfected into suspension-adapted HEK293T cells using Polyethylenimine (PEI; Cat #24765 Polysciences, Inc.). Typically, 100 ml of cells in suspension at a density of 1-2 Mio cells per ml was transfected with DNA containing 50 pg of expression vector encoding the heavy chain and 50 pg expression vectors encoding the light chain. The recombinant expression vectors were then introduced into the host cells and the construct produced by further culturing of the cells for a period of 7 days to allow for secretion into the culture medium (HEK, serum-fee medium) supplemented with 0.1% pluronic acid, 4 mM glutamine, and 0.25 μg/ml antibiotic.

[1094] The produced construct was then purified from cell-free supernatant using immunoaffinity chromatography. MabSelect Sure resin (GE Healthcare Life Sciences), equilibrated with PBS buffer pH 7.4 was incubated with filtered conditioned media using liquid chromatography system (Aekta pure chromatography system, GE Healthcare Life Sciences). The resin was washed with PBS pH 7.4 before the constructs were eluted with elution buffer (50 mM citrate, 90 mM NaCl, pH 2.7). After capture, eluted proteins were pH neutralized using 1M TRIS pH 10.0 solution and polished using size exclusion chromatography technique (HiPrep Superdex 200 16/60, GE Healthcare Life Sciences). Purified proteins were finally formulated in PBS buffer pH 7.4.

### 8.34. Example 34: Biophysical Properties of Fc Modified CD3 Antibodies: SPR-Binding of Modified Antibodies to Human Fc Gamma Receptors and Human C1q

[1095] Surface plasmon resonance (SPR) experiments were performed to analyze the interaction of human activating receptors FcγR1A, FcγR3A (V158) and human C1q with IgG1 WT and antibody-Fc variants. Binding kinetics and their relative binding affinities were explored. The binding affinity is an important characteristic of an interaction between an antibody and an antigen. The equilibrium dissociation constant (KD) defines how strong the interaction is and therefore how much antibody-antigen complex is formed at equilibrium.

[1096] The knowledge of the antibody characteristics is not only essential during selection of the best therapeutic antibody candidate, but also important to understand the in vivo behavior and potentially predict cellular immune responses. The aim is to generate antibody variants with little or no binding to Fc gamma receptors to reduce or eliminate effector function aiming to improve the safety of monoclonal antibody therapeutics. Binding to human C1q was evaluated. All SPR buffers were prepared using deionized water. The samples were prepared in running buffer PBS pH 7.4 with 0.005% Tween-20. SPR measurements were measured on a Biacore T200 (GE-Healthcare Life Sciences) controlled by Biacore T200 control software version 2.0.1. Surface plasmon resonance was conducted using a Biacore T200 to assess binding affinity of antibody IgG1 WT and variants to human Fc receptors, including FcγR1A, and FcγR3A (V158) and human C1q.

[1097] The antibodies were covalently immobilized on a CM5 sensor chip whereas Fc gamma receptors or human C1q served as analytes in solution (FIG. 38). For Fc gamma receptors binding evaluation (method 1), antibodies were diluted in 10 mM sodium acetate pH 4 and immobilized at a density of approximately 950 resonance units (RU's) on the CM5 sensor chip applying a standard amine coupling procedure. Flow cell 1 was blank immobilized to serve as a reference. The kinetic binding data were collected by subsequent injections of 1:2 dilution series of the human Fc gamma receptors on all flow cells at a flow rate of 30 μl/min and at a temperature of 25° C. The Fc gamma receptors were diluted in the running buffer at concentrations ranging from 0.2 nM to 1000 nM (e.g. FcγR1A: 0.2 to 100 nM, FcγR3A V158: 1.95 to 1000 nM). The chip surface was regenerated using 20 mM glycine pH 2.0 solution after each measuring cycle. For human C1q binding evaluation (method 2), antibodies were diluted in 10 mM sodium acetate pH 4 and immobilized at a density of approximately 7000 resonance units (RU's) on the CM5 sensor chip applying a standard amine coupling procedure. Flow cell 1 was blank immobilized to serve as a reference. The kinetic binding data were collected by subsequent injections of 1:2 dilution series of the human C1q on all flow cells at a flow rate of 30 μl/min and at a temperature of 25° C. The human C1q was diluted in the running buffer at concentrations ranging from 0.49 nM to 250 nM. The chip surface was regenerated using 50 mM NaOH solution after each measuring cycle. Zero concentration samples (blank runs) were measured for both methods to allow double-referencing during data evaluation.

[1098] Data were evaluated using the Biacore T200 evaluation software. The raw data were double referenced, i.e. the response of the measuring flow cell was corrected for the response of the reference flow cell, and in a second step the response of a blank injection was subtracted. Then the sensorgrams were fitted by applying a 1:1 kinetic binding model to calculate dissociation equilibrium constants. In addition, the maximum response reached during the experiment was monitored. Maximum response describes the binding capacity of the surface in terms of the response at saturation. The maximum response values summarizing these interactions are given in Table 30. The SPR Biacore binding sensorgrams for each variant to each receptor were depicted in FIG. 39, Concentration range: 0.2 nM-100 nM for FcgR1, 7.8 nM-4000 nm for FcgR2A R131 d FcγR3A (V158 and F158). FIG. 39A shows representative sensorgrams and response plots of WT and variants towards FcgammaR1A (Concentration range: 0.2 nM-100 nM for human FcγR1A). FIG. 39B shows representative sensorgrams and response plots of WT and variants towards FcgammaR3A V158 (Concentration range: 1.95 nM-1000 nM for human FcγR3A V158). FIG. 39C shows representative sensorgrams and response plots of WT and variants towards human C1q (Concentration range: 0.49 nM-250 nM for human C1q). All IgG1 antibody-Fc variants inhibit the binding to Fc gamma receptors compare to WT and little or no residual binding was measured. All IgG1 antibody-Fc variants inhibit the binding to human C1q compare to WT as low residual binding was measured.

TABLE 30
Maximum responses of WT-Fc and variants towards human FcgammaRs
and C1q determined by surface plasmon resonance

| | | | | |
|---|---|---|---|---|
| | | Maximum | Maximum | Maximum |
| | | response | response | response |
| | | at 100 nM | at 1000 nM | at 250 nM |
| | SEQ | hFcgammaRIA | hFcgammaRIIIA | hC1q |
| Fc | ID NO | (RU) | V158 (RU) | (RU) |

| | | | |
|---|---|---|---|
| WT | 193 | 79 | 680 |
| WT allotype | 193 | 72 | 640 |
| DANAPA | 11 | 31 | 29 |
| DAPA | 63 | 15 | 85 |
| LALAPA | 26 | 19 | 270 |
| LALAPG | 18 | 33 | 245 |
| LALAGA | 15 | 25 | 335 |
| LALASKPA | 9 | 20 | 95 |
| DAPASK | 13 | 15 | 86 |
| GADAPA | 16 | 9 | 203 |
| GADAPASK | 10 | 12 | 168 |

### 8.35. Example 35: Differential Scanning Calorimetry-Melting Temperature of Modified Antibodies

[1099] The thermal stability of engineered antibodies CH2 domains were compared using calorimetric measurements as shown in Table 31. Calorimetric measurements were carried out on a differential scanning micro calorimeter (Nano DSC, TA instruments). The cell volume was 0.5 ml and the heating rate was 1° C./min. All proteins were used at a concentration of 1 mg/m in PBS (pH 7.4). The molar heat capacity of each protein was estimated by comparison with duplicate samples containing identical buffer from which the protein had been omitted. The partial molar heat capacities and melting curves were analyzed using standard procedure. Thermograms were baseline corrected and concentration normalized. The silent version LALASKPA (70° C.) shows significantly better Tm compared to DANAPA (62° C.).

TABLE 31
Melting temperatures of WT-Fc and variants

| | Melting temperature (Tm) |
|---|---|
| Fc | of CH2 domain |
| WT | 70 |
| WT allotype R214K | 70 |
| LALAPA | 70 |
| LALAGA | 70 |
| LALAPG | 70 |
| DAPA | 65 |
| LALASKPA | 70 |
| DAPASK | 65 |
| GADAPA | 65 |
| GADAPASK | 65 |
| DANAPA | 62 |

### Aggregation Propensity Post Capture of IgG1 Anti-CD3 Antibody and Fc Variants

[1100] Size exclusion chromatography measurements were performed to evaluate the aggregation propensity (% HMW) of IgG1 antibody and Fc modified derivatives. The produced and purified anti CD3 antibodies were applied to an analytical size exclusion chromatography column (SEC 200, GE Healthcare), equilibrated with PBS buffer pH 7.4. Results are summarized in Table 32.

TABLE 32
Higher molecular weight content (%) of anti-CD3 antibodies

| Fc | (%) higher molecular weight |
|---|---|
| WT | 7.3 |
| WT allotype R214K | 7.7 |
| LALAPA | 1.8 |
| LALAGA | 2.9 |
| LALAPG | 4.2 |
| DAPA | 3.9 |
| LALASKPA | 4.9 |
| DAPASK | 3.6 |
| GADAPA | 8.0 |
| GADAPASK | 6.8 |
| DANAPA | 5.9 |

### 8.36. Example 36: Anti-CD3 NFAT Signalling Assay

[1101] Jurkat reporter gene assay (RGA) for the nuclear factor of activated T-cells (NFAT) pathway was performed using Jurkat NFAT luciferized (JNL) cells and THP-1 cells (ATCC, TIB202). THP-1 cells express FcγRI, FcγRII, and FcγRIII. Cells were co-incubated for 6 hours at 37° C., 5% CO2 at a 5:1 effector to tumor ratio with each sample at the various concentrations depicted. An equal volume of ONE-Glo™ reagent (Promega, E6110) was added to the culture volume. Plate was shaken for 2 minutes, then incubated for an additional 8 minutes protected from light. For JNL+ THP+IFNg experiment, THP-1 cells were pre-treated with 100 u/mL IFNg for 48 hours at 37° C., 5% CO2 before co-culture. IFNg stimulation increases FcγRI expression. Luciferase activity was quantitated on the EnVision plate reader (PerkinElmer). Data was analyzed and fit to a 5 parameter-logistic curve using GraphPad Prism.

[1102] In both treatments, WT showed the greatest NFAT activity. All silencing mutation sets overall showed significantly dampened NFAT activation. In the RGA, performed without IFNg (FIG. 40A), all silencing mutation sets showed comparable T-cell activation with the exception of DAPA. When the THP-1 cells were preincubated with IFNg (FIG. 40B), the mutation sets showed lower activity, demonstrating strong Fc silencing, but some activity remaining in DAPA, LALAPA and GADAPA.

### 8.37. Example 37: Expression and Purification of Modified Antibodies

[1103] For the experiments described below antibodies were used as shown in Table 33. Designed molecules were expressed in HEK293 mammalian cells, and purified using protein A and size exclusion chromatography. In brief, heavy chains and light chain DNA were synthesized at GeneArt (Regensburg, Germany) and cloned into a mammalian expression vector using restriction enzyme-ligation based cloning techniques. The resulting plasmids were co-transfected into HEK293T cells. For transient expression of antibodies, equal quantities of vector for each chain were co-transfected into suspension-adapted HEK293T cells using Polyethylenimine (PEI; Cat #24765 Polysciences, Inc.). Typically, 100 ml of cells in suspension at a density of 1-2 Mio cells per ml was transfected with DNA containing 33 pg of expression vector encoding the first heavy chain, 33 pg of expression vector encoding the second heavy chain and 33 pg expression vectors encoding the light chain. The recombinant expression vectors were then introduced into the host cells and the construct produced by further culturing of the cells for a period of 7 days to allow for secretion into the culture medium (HEK, serum-fee medium) supplemented with 0.1% pluronic acid, 4 mM glutamine, and 0.25 μg/ml antibiotic.

[1104] The produced construct was then purified from cell-free supernatant using immunoaffinity chromatography. MabSelect Sure resin (GE Healthcare Life Sciences), equilibrated with PBS buffer pH 7.4 was incubated with filtered conditioned media using liquid chromatography system (Aekta pure chromatography system, GE Healthcare Life Sciences). The resin was washed with PBS pH 7.4 before the constructs were eluted with elution buffer (50 mM citrate, 90 mM NaCl, pH 2.7). After capture, eluted proteins were pH neutralized using 1M TRIS pH 10.0 solution and polished using size exclusion chromatography technique (HiPrep Superdex 200 16/60, GE Healthcare Life Sciences). Purified proteins were finally formulated in PBS buffer pH 7.4.

TABLE 33
Sequences of Antibodies and Fc variant

| SEQ ID | | |
|---|---|---|
| No | Description | Sequence |
| 1110 | Anti-CD19 light | eivmtqspatlsvspgeratlscrasqdvgtavawyqqkpgqaprlliywastr |
| | chain | htgiparfsgsgsgteftltisslqsedfavyfcqqyanfplytfgqgtkleikrtvaa |
| | Amino acid | psvfifppsdeqlksgtasvvcllnnfypreakvqwkvdnalqsgnsqesvteq |
| | sequence | dskdstyslsstltlskadyekhkvyacevthqglsspvtksfnrgec |
| 1111 | Anti-CD19 light | gagatcgtgatgacacagtctccagccacactgtccgtgtctccaggcgagag |
| | chain | agctacactgagctgtagagccagccaggatgtgggaacagccgtggcctg |
| | Nucleic acid | gtatcagcagaaacctggacaagcccctcggctgctgatctactgggcctcta |
| | sequence | caagacacacaggcatccctgccagattttctggcagcggctctggcaccga |
| | | gttcaccctgacaatctctagcctccagagcgaggacttcgccgtgtacttctgc |
| | | cagcagtacgccaactttcccctgtacacctttggccagggcaccaagctgga |
| | | aatcaagagaacagtggccgctccgagcgtgttcatctttccaccaagcgacg |
| | | agcagctgaaaagcggcacagcctctgtcgtgtgcctgctgaacaacttctac |
| | | cccagagaagccaaggtgcagtggaaggtggacaatgccctccagtccggc |
| | | aatagccaagagagcgtgaccgagcaggacagcaaggatagcacataca |
| | | gcctgagcagcacactgaccctgagcaaggccgactacgagaagcacaaa |
| | | gtgtacgcctgcgaagtgacacaccagggcctgtctagccctgtgaccaaga |
| | | gcttcaacagaggcgagtgc |
| 1112 | Anti-CD19-CD3 | qvqlvqsgaevkkpgasvkvsckasgytfttywiqwvrqapgqrlewmgav |
| | WT IgG1 | ypgdadtrytqkfqgrvtltadrsastaymelsslrsedtavyycgrdagleyyal |
| | Heavy Chain | dywgqgtlvtvssastkgpsvfplapsskstsggtaalgclvkdyfpepvtvsw |
| | Amino acid | nsgaltsgvhtfpavlqssglyslssvvtvpssslgtqtyicnvnhkpsntkvdkr |
| | sequence | vepkscggggsggggsevalvesggglvqpggslklscaasgftfntyamn |
| | | wvrqasgkglewvgrirskynnyatyyadsvkdrftisrddskstlylqmnslkt |
| | | edtavyycvrhgnfgnsyvswfaywgqgtlvtvssggggsggggsggggsg |
| | | gggsqavvtqepsltvspggtvtltcrsstgavttsnyanwvqqkpgqaprglig |
| | | gtnkrapwtparfsgsllgdkaaltlsgaqpedeaeyfcalwysnlwvfgggtkl |
| | | tvlggggsdkthtcppcpapellggpsvflfppkpkdtlmisrtpevtcvvvdvs |
| | | hedpevkfnwyvdgvevhnaktkpreeqynstyrvvsvltvlhqdwlngkey |
| | | kckvsnkalpapiektiskakgqprepqvctlppsreemtknqvslscavkgfy |
| | | psdiavewesngqpennykttppvldsdgsfflvskltvdksrwqqgnvfscs |
| | | vmhealhnhytqkslslspgk |
| 1113 | Anti-CD19-CD3 | caggttcaactggttcagagcggagccgaagtgaagaaacctggggccagc |
| | WT IgG1 | gtgaaggtgtcctgtaaagccagcggctacacctttaccacctactggattcagt |
| | Heavy Chain | gggtccgacaggcccctggacagagacttgaatggatgggagctgtgtaccc |
| | Nucleic acid | cggcgacgccgataccagatacacccagaaattccagggcagagtgaccct |
| | sequence | gacagccgatagaagcgccagcacagcctacatggaactgagcagcctga |
| | | gaagcgaggataccgccgtgtactactgtggcagagatgccggcctggaata |
| | | ttacgccctggactattggggccagggcaccctggttacagtgtcctctgcctcta |
| | | caaagggcccctccgtttttccactggctcctagcagcaagagcacatctggtg |
| | | gaacagccgctctgggctgcctggtcaaggattactttcctgagcctgtgaccgt |
| | | gtcctggaatagcggagcactgacaagcggcgtgcacacatttccagccgtg |
| | | ctgcaaagcagcggcctgtactctctgtctagcgtggtcacagtgcctagctcta |
| | | gcctgggcacccagacctacatctgcaacgtgaaccacaagcctagcaaca |
| | | ccaaggtcgacaagagagtggaacccaagtcttgtggtggcggaggatctgg |
| | | cggaggcggatctgaagttcagcttgttgaatctggcggcggactggtgcaac |
| | | ctggcggatctctgaaactgtcttgtgccgcctccggcttcaccttcaatacctac |
| | | gccatgaactgggttcgacaagcctccggcaaaggactggaatgggtcgga |
| | | cggatcagaagcaagtacaacaactacgccacctactacgccgactccgtg |
| | | aaggacagattcaccatcagccgggacgactccaagagcaccctgtacctcc |
| | | agatgaactccctgaaaaccgaggacacagccgtctattattgcgtgcggcac |
| | | ggcaacttcggcaacagctatgtgtcttggtttgcctactggggacagggaacc |
| | | ctcgtgaccgtttcttcaggcggcggtggtagtggcggtggtggtagcggaggc |
| | | ggtggatcaggtggcggcggttctcaagctgtggtcacacaagagcccagcct |
| | | gacagtttctcctggcggaaccgtgacactgacctgtagatctagcaccggcg |
| | | cagtgaccaccagcaattacgctaactgggtgcagcagaagcccggccaag |
| | | ctcctagaggactgatcggaggcacaaacaagagagccccttggacaccag |
| | | ccagattttctggctctctgctgggcgataaggccgctcttacactgtctggcgca |
| | | cagcctgaagatgaggccgagtacttttgcgccctgtggtacagcaacctgtgg |
| | | gtgttcggcggaggaacaaagctgacagttcttggaggcggcggaagcgac |
| | | aagacccacacatgtcctccatgtcctgctccagaactgctcggcggaccctcc |
| | | gtgtttctgttccctccaaagccaaaggacaccctgatgatcagcagaacccct |
| | | gaagtgacctgcgtggtggtggatgtgtctcacgaggacccagaagtgaagtt |
| | | caattggtacgtggacggcgtggaagtgcacaacgccaagaccaagcctag |
| | | agaggaacagtacaacagcacctacagagtggtgtccgtgctgacagtgctg |
| | | caccaggactggctgaacggcaaagagtacaagtgcaaggtgtccaacaa |
| | | ggccctgcctgctcctatcgagaaaaccatcagcaaggccaagggccagcct |
| | | agggaacctcaagtgtgcactctgcctccaagccgggaagagatgaccaag |
| | | aatcaggtgtccctgagctgcgccgtgaagggcttttacccttccgatatcgccg |
| | | tggaatgggagagcaatggccagccagagaacaactacaagaccacacct |
| | | cctgtgctggacagcgacggctcattcttcctggtgtctaagctgaccgtggaca |
| | | agagcagatggcagcagggcaacgtgttcagctgttctgtgatgcacgaggc |
| | | cctgcacaaccactacacacagaagtccctgtctctgagccccggcaaa |
| 1114 | Anti-CD58 | sqqiygvvygnvtfhvpsnvplkevlwkkqkdkvaelensefrafssfknrvyl |
| | WT IgG1 | dtvsgsltiynltssdedeyemespnitdtmkfflyvlesggggsdkthtcppcp |
| | Heavy Chain | apellggpsvflfppkpkdtlmisrtpevtcvvvdvshedpevkfnwyvdgvev |
| | Amino acid | hnaktkpreeqynstyrvvsvltvlhqdwlngkeykckvsnkalpapiektisk |
| | sequence | akgqprepqvytlppcreemtknqvslwclvkgfypsdiavewesngqpen |
| | | nykttppvldsdgsfflyskltvdksrwqqgnvfscsvmhealhnhytqkslsls |
| | | pgk |
| 1115 | Anti-CD58 | tctcagcagatctatggcgtggtgtacggcaacgtgaccttccacgtgccaagc |
| | WT IgG1 | aacgtgcccctgaaagaggtgctctggaagaaacagaaagacaaggtggc |
| | Heavy Chain | cgagctggaaaacagcgagttcagagccttcagcagcttcaagaaccgggt |
| | Nucleic acid | gtacctggataccgtgtccggcagcctgaccatctacaatctgaccagcagcg |
| | sequence | acgaggacgagtacgagatggaaagccccaacatcaccgacaccatgaag |
| | | ttctttctgtacgtgctggaaagcggcggaggcggctctgataagacacacac |
| | | atgtcctccatgtcctgctccagagctgctcggcggaccttctgttttcctgtttcca |
| | | cctaagccaaaggacaccctgatgatcagcagaacccctgaagtgacctgc |
| | | gtggtggtggatgtgtctcacgaggaccccgaagtgaagttcaattggtacgtg |
| | | gacggcgtggaagtgcacaacgccaagaccaagcctagagaggaacagt |
| | | acaacagcacctacagagtggtgtccgtgctgaccgtgctgcaccaggattgg |
| | | ctgaacggcaaagagtacaagtgcaaggtgtccaacaaggccctgcctgctc |
| | | ctatcgagaaaaccatcagcaaggccaagggccagccaagagaacccca |
| | | ggtttacaccctgcctccatgccgggaagagatgaccaagaatcaggtgtccc |
| | | tgtggtgcctggtcaagggcttctacccttccgatatcgccgtggaatgggaga |
| | | gcaatggccagcctgagaacaactacaagaccacacctcctgtgctggaca |
| | | gcgacggctcattcttcctgtacagcaagctgacagtggacaagagcagatg |
| | | gcagcagggcaacgtgttcagctgttctgtgatgcacgaggccctgcacaacc |
| | | actacacccagaagtctctgtctctgagccccggcaaa |
| 1116 | Anti-CD19-CD3 | qvqlvqsgaevkkpgasvkvsckasgytfttywiqwvrqapgqrlewmgav |
| | DANAPA IgG1 | ypgdadtrytqkfqgrvtltadrsastaymelsslrsedtavyycgrdagleyyal |
| | Heavy Chain | dywgqgtlvtvssastkgpsvfplapsskstsggtaalgclvkdyfpepvtvsw |
| | Amino acid | nsgaltsgvhtfpavlqssglyslssvvtvpssslgtqtyicnvnhkpsntkvdkr |
| | sequence | vepkscggggsggggsevalvesggglvqpggslklscaasgftfntyamn |
| | | wvrqasgkglewvgrirskynnyatyyadsvkdrftisrddskstlylqmnslkt |
| | | edtavyycvrhgnfgnsyvswfaywgqgtlvtvssggggsggggsggggsg |
| | | gggsqavvtqepsltvspggtvtltcrsstgavttsnyanwvqqkpgqaprglig |
| | | gtnkrapwtparfsgsllgdkaaltlsgaqpedeaeyfcalwysnlwvfgggtkl |
| | | tvlggggsdkthtcppcpapellggpsvflfppkpkdtlmisrtpevtcvvvavs |
| | | hedpevkfnwyvdgvevhnaktkpreeqyastyrvvsvltvlhqdwlngkey |
| | | kckvsnkalaapiektiskakgqprepqvctlppsreemtknqvslscavkgfy |
| | | psdiavewesngqpennykttppvldsdgsfflvskltvdksrwqqgnvfscs |
| | | vmhealhnhytqkslslspgk |
| 1117 | Anti-CD19-CD3 | caggttcaactggttcagagcggagccgaagtgaagaaacctggggccagc |
| | DANAPA IgG1 | gtgaaggtgtcctgtaaagccagcggctacacctttaccacctactggattcagt |
| | Heavy Chain | gggtccgacaggcccctggacagagacttgaatggatgggagctgtgtaccc |
| | Nucleic acid | cggcgacgccgataccagatacacccagaaattccagggcagagtgaccct |
| | sequence | gacagccgatagaagcgccagcacagcctacatggaactgagcagcctga |
| | | gaagcgaggataccgccgtgtactactgtggcagagatgccggcctggaata |
| | | ttacgccctggactattggggccagggcaccctggttacagtgtcctctgcctcta |
| | | caaagggcccctccgtttttccactggctcctagcagcaagagcacatctggtg |
| | | gaacagccgctctgggctgcctggtcaaggattactttcctgagcctgtgaccgt |
| | | gtcctggaatagcggagcactgacaagcggcgtgcacacatttccagccgtg |
| | | ctgcaaagcagcggcctgtactctctgtctagcgtggtcacagtgcctagctcta |
| | | gcctgggcacccagacctacatctgcaacgtgaaccacaagcctagcaaca |
| | | ccaaggtcgacaagagagtggaacccaagtcttgtggtggcggaggatctgg |
| | | cggaggcggatctgaagttcagcttgttgaatctggcggcggactggtgcaac |
| | | ctggcggatctctgaaactgtcttgtgccgcctccggcttcaccttcaatacctac |
| | | gccatgaactgggttcgacaagcctccggcaaaggactggaatgggtcgga |
| | | cggatcagaagcaagtacaacaactacgccacctactacgccgactccgtg |
| | | aaggacagattcaccatcagccgggacgactccaagagcaccctgtacctcc |
| | | agatgaactccctgaaaaccgaggacacagccgtctattattgcgtgcggcac |
| | | ggcaacttcggcaacagctatgtgtcttggtttgcctactggggacagggaacc |
| | | ctcgtgaccgtttcttcaggcggcggtggtagtggcggtggtggtagcggaggc |
| | | ggtggatcaggtggcggcggttctcaagctgtggtcacacaagagcccagcct |
| | | gacagtttctcctggcggaaccgtgacactgacctgtagatctagcaccggcg |
| | | cagtgaccaccagcaattacgctaactgggtgcagcagaagcccggccaag |
| | | ctcctagaggactgatcggaggcacaaacaagagagccccttggacaccag |
| | | ccagattttctggctctctgctgggcgataaggccgctcttacactgtctggcgca |
| | | cagcctgaagatgaggccgagtacttttgcgccctgtggtacagcaacctgtgg |
| | | gtgttcggcggaggaacaaagctgacagttcttggaggcggcggaagcgac |
| | | aagacccacacatgtcctccatgtcctgctccagaactgctcggcggaccctcc |
| | | gtgtttctgttccctccaaagccaaaggacaccctgatgatcagcagaacccct |
| | | gaagtgacctgtgtggtggtggccgtgtctcacgaggacccagaagtgaagtt |
| | | caattggtacgtggacggcgtggaagtgcacaacgccaagaccaagcctag |
| | | agaggaacagtacgccagcacctacagagtggtgtctgtgctgacagtgctg |
| | | caccaggactggctgaacggcaaagagtacaagtgcaaggtgtccaacaa |
| | | ggccctggccgctcctatcgagaaaaccatctctaaggccaagggccagcct |
| | | cgggaacctcaagtgtgcactcttccacctagccgggaagagatgaccaaga |
| | | accaggtgtcactgagctgcgccgtgaagggcttctacccttctgatatcgccgt |
| | | ggaatgggagagcaacggccagccagagaacaactacaagaccacacct |
| | | cctgtgctggacagcgacggctcattcttcctggtgtctaagctgaccgtggaca |
| | | agagcagatggcagcagggcaacgtgttcagctgttctgtgatgcacgaggc |
| | | cctgcacaaccactacacacagaagtccctgtctctgagccccggcaaa |
| 1118 | Anti-CD58 | sqqiygvvygnvtfhvpsnvplkevlwkkqkdkvaelensefrafssfknrvyl |
| | DANAPA IgG1 | dtvsgsltiynltssdedeyemespnitdtmkfflyvlesggggsdkthtcppcp |
| | Heavy Chain | apellggpsvflfppkpkdtlmisrtpevtcvvvavshedpevkfnwyvdgvev |
| | Amino acid | hnaktkpreeqyastyrvvsvltvlhqdwlngkeykckvsnkalaapiektisk |
| | sequence | akgqprepqvytlppcreemtknqvslwclvkgfypsdiavewesngqpen |
| | | nykttppvldsdgsfflyskltvdksrwqqgnvfscsvmhealhnhytqkslsls |
| | | pgk |
| 1119 | Anti-CD58 | tctcagcagatctatggcgtggtgtacggcaacgtgaccttccacgtgccaagc |
| | DANAPA IgG1 | aacgtgcccctgaaagaggtgctctggaagaaacagaaagacaaggtggc |
| | Heavy Chain | cgagctggaaaacagcgagttcagagccttcagcagcttcaagaaccgggt |
| | Nucleic acid | gtacctggataccgtgtccggcagcctgaccatctacaatctgaccagcagcg |
| | sequence | acgaggacgagtacgagatggaaagccccaacatcaccgacaccatgaag |
| | | ttctttctgtacgtgctggaaagcggcggaggcggctctgataagacacacac |
| | | atgtcctccatgtcctgctccagagctgctcggcggaccttctgttttcctgtttcca |
| | | cctaagccaaaggacaccctgatgatcagcagaacccctgaagtgacctgtg |
| | | tggtggtggccgtgtctcacgaagatcccgaagtgaagttcaattggtacgtgg |
| | | acggcgtggaagtgcacaacgccaagaccaagcctagagaggaacagta |
| | | cgccagcacctatagagtggtgtccgtgctgacagtgctgcaccaggactggc |
| | | tgaacggcaaagagtacaagtgcaaggtgtccaacaaggccctggccgctc |
| | | ctatcgagaaaaccatctctaaggccaagggccagcctcgggaaccacagg |
| | | tttacaccctgcctccatgccgggaagagatgaccaagaatcaggtgtccctgt |
| | | ggtgcctggtcaagggcttctacccttccgatatcgccgtggaatgggagagca |
| | | atggccagcctgagaacaactacaagaccacacctcctgtgctggacagcg |
| | | acggctcattcttcctgtacagcaagctgaccgtggacaagagcagatggcag |
| | | cagggcaacgtgttcagctgttctgtgatgcacgaggccctgcacaaccacta |
| | | cacccagaagtctctgtctctgagccccggcaaa |
| 1120 | Anti-CD19-CD3 | qvqlvqsgaevkkpgasvkvsckasgytfttywiqwvrqapgqrlewmgav |
| | GADAPASK IgG1 | ypgdadtrytqkfqgrvtltadrsastaymelsslrsedtavyycgrdagleyyal |
| | Heavy Chain | dywgqgtlvtvssastkgpsvfplapsskstsggtaalgclvkdyfpepvtvsw |
| | Amino acid | nsgaltsgvhtfpavlqssglyslssvvtvpssslgtqtyicnvnhkpsntkvdkr |
| | sequence | vepkscggggsggggsevqlvesggglvqpggslklscaasgftfntyamn |
| | | wvrqasgkglewvgrirskynnyatyyadsvkdrftisrddskstlylqmnslkt |
| | | edtavyycvrhgnfgnsyvswfaywgqgtlvtvssggggsggggsggggsg |
| | | gggsqavvtqepsltvspggtvtltcrsstgavttsnyanwvqqkpgqaprglig |
| | | gtnkrapwtparfsgsllgdkaaltlsgaqpedeaeyfcalwysnlwvfgggtkl |
| | | tvlggggsdkthtcppcpapellgapsvflfppkpkdtlmisrtpevtcvvvavk |
| | | hedpevkfnwyvdgvevhnaktkpreeqynstyrvvsvltvlhqdwlngkey |
| | | kckvsnkalaapiektiskakgqprepqvctlppsreemtknqvslscavkgfy |
| | | psdiavewesngqpennykttppvldsdgsfflvskltvdksrwqqgnvfscs |
| | | vmhealhnhytqkslslspgk |
| 1121 | Anti-CD19-CD3 | caggttcaactggttcagagcggagccgaagtgaagaaacctggggccagc |
| | GADAPASK IgG1 | gtgaaggtgtcctgtaaagccagcggctacacctttaccacctactggattcagt |
| | Heavy Chain | gggtccgacaggcccctggacagagacttgaatggatgggagctgtgtaccc |
| | Nucleic acid | cggcgacgccgataccagatacacccagaaattccagggcagagtgaccct |
| | sequence | gacagccgatagaagcgccagcacagcctacatggaactgagcagcctga |
| | | gaagcgaggataccgccgtgtactactgtggcagagatgccggcctggaata |
| | | ttacgccctggactattggggccagggcaccctggttacagtgtcctctgcctcta |
| | | caaagggcccctccgtttttccactggctcctagcagcaagagcacatctggtg |
| | | gaacagccgctctgggctgcctggtcaaggattactttcctgagcctgtgaccgt |
| | | gtcctggaatagcggagcactgacaagcggcgtgcacacatttccagccgtg |
| | | ctgcaaagcagcggcctgtactctctgtctagcgtggtcacagtgcctagctcta |
| | | gcctgggcacccagacctacatctgcaacgtgaaccacaagcctagcaaca |
| | | ccaaggtcgacaagagagtggaacccaagtcttgtggtggcggaggatctgg |
| | | cggaggcggatctgaagttcagcttgttgaatctggcggcggactggtgcaac |
| | | ctggcggatctctgaaactgtcttgtgccgcctccggcttcaccttcaatacctac |
| | | gccatgaactgggttcgacaagcctccggcaaaggactggaatgggtcgga |
| | | cggatcagaagcaagtacaacaactacgccacctactacgccgactccgtg |
| | | aaggacagattcaccatcagccgggacgactccaagagcaccctgtacctcc |
| | | agatgaactccctgaaaaccgaggacacagccgtctattattgcgtgcggcac |
| | | ggcaacttcggcaacagctatgtgtcttggtttgcctactggggacagggaacc |
| | | ctcgtgaccgtttcttcaggcggcggtggtagtggcggtggtggtagcggaggc |
| | | ggtggatcaggtggcggcggttctcaagctgtggtcacacaagagcccagcct |
| | | gacagtttctcctggcggaaccgtgacactgacctgtagatctagcaccggcg |
| | | cagtgaccaccagcaattacgctaactgggtgcagcagaagcccggccaag |
| | | ctcctagaggactgatcggaggcacaaacaagagagccccttggacaccag |
| | | ccagattttctggctctctgctgggcgataaggccgctcttacactgtctggcgca |
| | | cagcctgaagatgaggccgagtacttttgcgccctgtggtacagcaacctgtgg |
| | | gtgttcggcggaggaacaaagctgacagttcttggaggcggcggaagcgac |
| | | aagacccacacatgtcctccatgtcctgctccagaactgctgggagcccctag |
| | | cgttttcctgtttcctccaaagccaaaggacaccctgatgatcagcagaacccct |
| | | gaagtgacctgtgtggtggtggccgtgaagcacgaggacccagaagtgaagt |
| | | tcaattggtacgtggacggcgtggaagtgcacaacgccaagaccaagccta |
| | | gagaggaacagtacaacagcacctacagagtggtgtccgtgctgacagtgct |
| | | gcaccaggactggctgaacggcaaagagtacaagtgcaaggtgtccaaca |
| | | aggccctggccgctcctatcgagaaaaccatctctaaggccaagggccagcc |
| | | tcgggaacctcaagtgtgcactcttccacctagccgggaagagatgaccaag |
| | | aaccaggtgtcactgagctgcgccgtgaagggcttctacccttctgatatcgcc |
| | | gtggaatgggagagcaacggccagccagagaacaactacaagaccacac |
| | | ctcctgtgctggacagcgacggctcattcttcctggtgtctaagctgaccgtgga |
| | | caagagcagatggcagcagggcaacgtgttcagctgttctgtgatgcacgag |
| | | gccctgcacaaccactacacacagaagtccctgtctctgagccccggcaaa |
| 1122 | Anti-CD58 | sqqiygvvygnvtfhvpsnvplkevlwkkqkdkvaelensefrafssfknrvyl |
| | GADAPASK IgG1 | dtvsgsltiynltssdedeyemespnitdtmkfflyvlesggggsdkthtcppcp |
| | Heavy Chain | apellgapsvflfppkpkdtlmisrtpevtcvvvavkhedpevkfnwyvdgvev |
| | Amino acid | hnaktkpreeqynstyrvvsvltvlhqdwlngkeykckvsnkalaapiektisk |
| | sequence | akgqprepqvytlppcreemtknqvslwclvkgfypsdiavewesngqpen |
| | | nykttppvldsdgsfflyskltvdksrwqqgnvfscsvmhealhnhytqkslsls |
| | | pgk |
| 1123 | Anti-CD58 | tctcagcagatctatggcgtggtgtacggcaacgtgaccttccacgtgccaagc |
| | GADAPASK IgG1 | aacgtgcccctgaaagaggtgctctggaagaaacagaaagacaaggtggc |
| | Heavy Chain | cgagctggaaaacagcgagttcagagccttcagcagcttcaagaaccgggt |
| | Nucleic acid | gtacctggataccgtgtccggcagcctgaccatctacaatctgaccagcagcg |
| | sequence | acgaggacgagtacgagatggaaagccccaacatcaccgacaccatgaag |
| | | ttctttctgtacgtgctggaaagcggcggaggcggctctgataagacacacac |
| | | atgtcctccatgtcctgctccagaactgctgggagcccctagcgttttcctgtttcct |
| | | ccaaagccaaaggacaccctgatgatcagcagaacccctgaagtgacctgt |
| | | gtggtggtggccgtgaagcacgaagatcccgaagtgaagttcaattggtacgt |
| | | ggacggcgtggaagtgcacaacgccaagaccaagcctagagaggaacag |
| | | tacaacagcacctacagagtggtgtccgtgctgaccgtgctgcaccaggattg |
| | | gctgaacggcaaagagtacaagtgcaaggtgtccaacaaggccctggccgc |
| | | tcctatcgagaaaaccatctctaaggccaagggccagcctcgggaaccaca |
| | | ggtttacaccctgcctccatgccgggaagagatgaccaagaatcaggtgtccc |
| | | tgtggtgcctggtcaagggcttctacccttccgatatcgccgtggaatgggaga |
| | | gcaatggccagcctgagaacaactacaagaccacacctcctgtgctggaca |
| | | gcgacggctcattcttcctgtacagcaagctgacagtggacaagagcagatg |
| | | gcagcagggcaacgtgttcagctgttctgtgatgcacgaggccctgcacaacc |
| | | actacacccagaagtctctgtctctgagccccggcaaa |
| 1124 | Anti-CD19-CD3 | qvqlvqsgaevkkpgasvkvsckasgytfttywiqwvrqapgqrlewmgav |
| | LALA IgG1 | ypgdadtrytqkfqgrvtltadrsastaymelsslrsedtavyycgrdagleyyal |
| | Heavy Chain | dywgqgtlvtvssastkgpsvfplapsskstsggtaalgclvkdyfpepvtvsw |
| | Amino acid | nsgaltsgvhtfpavlqssglyslssvvtvpssslgtqtyicnvnhkpsntkvdkr |
| | sequence | vepkscggggsggggsevalvesggglvqpggslklscaasgftfntyamn |
| | | wvrqasgkglewvgrirskynnyatyyadsvkdrftisrddskstlylqmnsikt |
| | | edtavyycvrhgnfgnsyvswfaywgqgtlvtvssggggsggggsggggsg |
| | | gggsqavvtqepsltvspggtvtltcrsstgavttsnyanwvqqkpgqaprglig |
| | | gtnkrapwtparfsgsllgdkaaltlsgaqpedeaeyfcalwysnlwvfgggtkl |
| | | tvlggggsdkthtcppcpapeaaggpsvflfppkpkdtlmisrtpevtcvvvdv |
| | | shedpevkfnwyvdgvevhnaktkpreeqynstyrvvsvltvlhqdwlngke |
| | | ykckvsnkalpapiektiskakgqprepqvctlppsreemtknqvslscavkgf |
| | | ypsdiavewesngqpennykttppvldsdgsfflvskltvdksrwqqgnvfsc |
| | | svmhealhnhytqkslslspgk |
| 1125 | Anti-CD19-CD3 | caggttcaactggttcagagcggagccgaagtgaagaaacctggggccagc |
| | LALA IgG1 | gtgaaggtgtcctgtaaagccagcggctacacctttaccacctactggattcagt |
| | Heavy Chain | gggtccgacaggcccctggacagagacttgaatggatgggagctgtgtaccc |
| | Nucleic acid | cggcgacgccgataccagatacacccagaaattccagggcagagtgaccct |
| | sequence | gacagccgatagaagcgccagcacagcctacatggaactgagcagcctga |
| | | gaagcgaggataccgccgtgtactactgtggcagagatgccggcctggaata |
| | | ttacgccctggactattggggccagggcaccctggttacagtgtcctctgcctcta |
| | | caaagggcccctccgtttttccactggctcctagcagcaagagcacatctggtg |
| | | gaacagccgctctgggctgcctggtcaaggattactttcctgagcctgtgaccgt |
| | | gtcctggaatagcggagcactgacaagcggcgtgcacacatttccagccgtg |
| | | ctgcaaagcagcggcctgtactctctgtctagcgtggtcacagtgcctagctcta |
| | | gcctgggcacccagacctacatctgcaacgtgaaccacaagcctagcaaca |
| | | ccaaggtcgacaagagagtggaacccaagtcttgtggtggcggaggatctgg |
| | | cggaggcggatctgaagttcagcttgttgaatctggcggcggactggtgcaac |
| | | ctggcggatctctgaaactgtcttgtgccgcctccggcttcaccttcaatacctac |
| | | gccatgaactgggttcgacaagcctccggcaaaggactggaatgggtcgga |
| | | cggatcagaagcaagtacaacaactacgccacctactacgccgactccgtg |
| | | aaggacagattcaccatcagccgggacgactccaagagcaccctgtacctcc |
| | | agatgaactccctgaaaaccgaggacacagccgtctattattgcgtgcggcac |
| | | ggcaacttcggcaacagctatgtgtcttggtttgcctactggggacagggaacc |
| | | ctcgtgaccgtttcttcaggcggcggtggtagtggcggtggtggtagcggaggc |
| | | ggtggatcaggtggcggcggttctcaagctgtggtcacacaagagcccagcct |
| | | gacagtttctcctggcggaaccgtgacactgacctgtagatctagcaccggcg |
| | | cagtgaccaccagcaattacgctaactgggtgcagcagaagcccggccaag |
| | | ctcctagaggactgatcggaggcacaaacaagagagccccttggacaccag |
| | | ccagattttctggctctctgctgggcgataaggccgctcttacactgtctggcgca |
| | | cagcctgaagatgaggccgagtacttttgcgccctgtggtacagcaacctgtgg |
| | | gtgttcggcggaggaacaaagctgacagttcttggaggcggcggaagcgac |
| | | aagacccacacatgtcctccatgtcctgctccagaagctgctggcggaccctc |
| | | cgtgtttctgttccctccaaagccaaaggacaccctgatgatcagcagaacccc |
| | | tgaagtgacctgcgtggtggtggatgtgtctcacgaggacccagaagtgaagtt |
| | | caattggtacgtggacggcgtggaagtgcacaacgccaagaccaagcctag |
| | | agaggaacagtacaacagcacctacagagtggtgtccgtgctgacagtgctg |
| | | caccaggactggctgaacggcaaagagtacaagtgcaaggtgtccaacaa |
| | | ggccctgcctgctcctatcgagaaaaccatcagcaaggccaagggccagcct |
| | | agggaacctcaagtgtgcactctgcctccaagccgggaagagatgaccaag |
| | | aatcaggtgtccctgagctgcgccgtgaagggcttttacccttccgatatcgccg |
| | | tggaatgggagagcaatggccagccagagaacaactacaagaccacacct |
| | | cctgtgctggacagcgacggctcattcttcctggtgtctaagctgaccgtggaca |
| | | agagcagatggcagcagggcaacgtgttcagctgttctgtgatgcacgaggc |
| | | cctgcacaaccactacacacagaagtccctgtctctgagccccggcaaa |
| 1126 | Anti-CD58 | sqqiygvvygnvtfhvpsnvplkevlwkkqkdkvaelensefrafssfknrvyl |
| | LALA IgG1 | dtvsgsltiynltssdedeyemespnitdtmkfflyvlesggggsdkthtcppcp |
| | Heavy Chain | apeaaggpsvflfppkpkdtlmisrtpevtcvvvdvshedpevkfnwyvdgv |
| | Amino acid | evhnaktkpreeqynstyrvvsvltvlhqdwlngkeykckvsnkalpapiekti |
| | sequence | skakgqprepqvytlppcreemtknqvslwclvkgfypsdiavewesngqp |
| | | ennykttppvldsdgsfflyskltvdksrwqqgnvfscsvmhealhnhytqksl |
| | | slspgk |
| 1168 | Anti-CD58 | tctcagcagatctatggcgtggtgtacggcaacgtgaccttccacgtgccaagc |
| | LALA IgG1 | aacgtgcccctgaaagaggtgctctggaagaaacagaaagacaaggtggc |
| | Heavy Chain | cgagctggaaaacagcgagttcagagccttcagcagcttcaagaaccgggt |
| | Nucleic acid | gtacctggataccgtgtccggcagcctgaccatctacaatctgaccagcagcg |
| | sequence | acgaggacgagtacgagatggaaagccccaacatcaccgacaccatgaag |
| | | ttctttctgtacgtgctggaaagcggcggaggcggctctgataagacacacac |
| | | atgtcctccatgtcctgctccagaagcagctggcggaccctctgttttcctgtttcc |
| | | acctaagccaaaggacaccctgatgatcagcagaacccctgaagtgacctg |
| | | cgtggtggtggatgtgtctcacgaggaccccgaagtgaagttcaattggtacgt |
| | | ggacggcgtggaagtgcacaacgccaagaccaagcctagagaggaacag |
| | | tacaacagcacctacagagtggtgtccgtgctgaccgtgctgcaccaggattg |
| | | gctgaacggcaaagagtacaagtgcaaggtgtccaacaaggccctgcctgct |
| | | cctatcgagaaaaccatcagcaaggccaagggccagccaagagaacccc |
| | | aggtttacaccctgcctccatgccgggaagagatgaccaagaatcaggtgtcc |
| | | ctgtggtgcctggtcaagggcttctacccttccgatatcgccgtggaatgggaga |
| | | gcaatggccagcctgagaacaactacaagaccacacctcctgtgctggaca |
| | | gcgacggctcattcttcctgtacagcaagctgacagtggacaagagcagatg |
| | | gcagcagggcaacgtgttcagctgttctgtgatgcacgaggccctgcacaacc |
| | | actacacccagaagtctctgtctctgagccccggcaaa |
| 1127 | Anti-CD19-CD3 | qvqlvqsgaevkkpgasvkvsckasgytfttywiqwvrqapgqrlewmgav |
| | LALASKPA IgG1 | ypgdadtrytqkfqgrvtltadrsastaymelsslrsedtavyycgrdagleyyal |
| | Heavy Chain | dywgqgtlvtvssastkgpsvfplapsskstsggtaalgclvkdyfpepvtvsw |
| | Amino acid | nsgaltsgvhtfpavlqssglyslssvvtvpssslgtqtyicnvnhkpsntkvdkr |
| | sequence | vepkscggggsggggsevqlvesggglvqpggslklscaasgftfntyamn |
| | | wvrqasgkglewvgrirskynnyatyyadsvkdrftisrddskstlylqmnslkt |
| | | edtavyycvrhgnfgnsyvswfaywgqgtlvtvssggggsggggsggggsg |
| | | gggsqavvtqepsltvspggtvtltcrsstgavttsnyanwvqqkpgqaprglig |
| | | gtnkrapwtparfsgsllgdkaaltlsgaqpedeaeyfcalwysnlwvfgggtkl |
| | | tvlggggsdkthtcppcpapeaaggpsvflfppkpkdtlmisrtpevtcvvvdv |
| | | khedpevkfnwyvdgvevhnaktkpreeqynstyrvvsvltvlhqdwlngke |
| | | ykckvsnkalaapiektiskakgqprepqvctlppsreemtknqvslscavkgf |
| | | ypsdiavewesngqpennykttppvldsdgsfflvskltvdksrwqqgnvfsc |
| | | svmhealhnhytqkslslspgk |
| 1128 | Anti-CD19-CD3 | caggttcaactggttcagagcggagccgaagtgaagaaacctggggccagc |
| | LALASKPA lgG1 | gtgaaggtgtcctgtaaagccagcggctacacctttaccacctactggattcagt |
| | Heavy Chain | gggtccgacaggcccctggacagagacttgaatggatgggagctgtgtaccc |
| | Nucleic acid | cggcgacgccgataccagatacacccagaaattccagggcagagtgaccct |
| | sequence | gacagccgatagaagcgccagcacagcctacatggaactgagcagcctga |
| | | gaagcgaggataccgccgtgtactactgtggcagagatgccggcctggaata |
| | | ttacgccctggactattggggccagggcaccctggttacagtgtcctctgcctcta |
| | | caaagggcccctccgtttttccactggctcctagcagcaagagcacatctggtg |
| | | gaacagccgctctgggctgcctggtcaaggattactttcctgagcctgtgaccgt |
| | | gtcctggaatagcggagcactgacaagcggcgtgcacacatttccagccgtg |
| | | ctgcaaagcagcggcctgtactctctgtctagcgtggtcacagtgcctagctcta |
| | | gcctgggcacccagacctacatctgcaacgtgaaccacaagcctagcaaca |
| | | ccaaggtcgacaagagagtggaacccaagtcttgtggtggcggaggatctgg |
| | | cggaggcggatctgaagttcagcttgttgaatctggcggcggactggtgcaac |
| | | ctggcggatctctgaaactgtcttgtgccgcctccggcttcaccttcaatacctac |
| | | gccatgaactgggttcgacaagcctccggcaaaggactggaatgggtcgga |
| | | cggatcagaagcaagtacaacaactacgccacctactacgccgactccgtg |
| | | aaggacagattcaccatcagccgggacgactccaagagcaccctgtacctcc |
| | | agatgaactccctgaaaaccgaggacacagccgtctattattgcgtgcggcac |
| | | ggcaacttcggcaacagctatgtgtcttggtttgcctactggggacagggaacc |
| | | ctcgtgaccgtttcttcaggcggcggtggtagtggcggtggtggtagcggaggc |
| | | ggtggatcaggtggcggcggttctcaagctgtggtcacacaagagcccagcct |
| | | gacagtttctcctggcggaaccgtgacactgacctgtagatctagcaccggcg |
| | | cagtgaccaccagcaattacgctaactgggtgcagcagaagcccggccaag |
| | | ctcctagaggactgatcggaggcacaaacaagagagccccttggacaccag |
| | | ccagattttctggctctctgctgggcgataaggccgctcttacactgtctggcgca |
| | | cagcctgaagatgaggccgagtacttttgcgccctgtggtacagcaacctgtgg |
| | | gtgttcggcggaggaacaaagctgacagttcttggaggcggcggaagcgac |
| | | aagacccacacatgtcctccatgtcctgctccagaagctgctggcggaccctc |
| | | cgtgtttctgttccctccaaagccaaaggacaccctgatgatcagcagaacccc |
| | | tgaagtgacctgcgtggtggtggatgtgaagcacgaggacccagaagtgaa |
| | | gttcaattggtacgtggacggcgtggaagtgcacaacgccaagaccaagcct |
| | | agagaggaacagtacaacagcacctacagagtggtgtccgtgctgacagtg |
| | | ctgcaccaggactggctgaacggcaaagagtacaagtgcaaggtgtccaac |
| | | aaggccctggccgctcctatcgagaaaaccatctctaaggccaagggccag |
| | | cctcgggaacctcaagtgtgcactcttccacctagccgggaagagatgacca |
| | | agaaccaggtgtcactgagctgcgccgtgaagggcttctacccttctgatatcg |
| | | ccgtggaatgggagagcaacggccagccagagaacaactacaagaccac |
| | | acctcctgtgctggacagcgacggctcattcttcctggtgtctaagctgaccgtg |
| | | gacaagagcagatggcagcagggcaacgtgttcagctgtagcgtgatgcac |
| | | gaggccctgcacaaccactacacacagaagtccctgtctctgagccccggca |
| | | aa |
| 1129 | Anti-CD58 | sqqiygvvygnvtfhvpsnvplkevlwkkqkdkvaelensefrafssfknrvyl |
| | LALASKPA IgG1 | dtvsgsltiynltssdedeyemespnitdtmkfflyvlesggggsdkthtcppcp |
| | Heavy Chain | apeaaggpsvflfppkpkdtlmisrtpevtcvvvdvkhedpevkfnwyvdgv |
| | Amino acid | evhnaktkpreeqynstyrvvsvltvlhqdwlngkeykckvsnkalaapiekti |
| | sequence | skakgqprepqvytlppcreemtknqvslwclvkgfypsdiavewesngqp |
| | | ennykttppvldsdgsfflyskltvdksrwqqgnvfscsvmhealhnhytqksl |
| | | slspgk |
| 1130 | Anti-CD58 | tctcagcagatctatggcgtggtgtacggcaacgtgaccttccacgtgccaagc |
| | LALASKPA IgG1 | aacgtgcccctgaaagaggtgctctggaagaaacagaaagacaaggtggc |
| | Heavy Chain | cgagctggaaaacagcgagttcagagccttcagcagcttcaagaaccgggt |
| | Nucleic acid | gtacctggataccgtgtccggcagcctgaccatctacaatctgaccagcagcg |
| | sequence | acgaggacgagtacgagatggaaagccccaacatcaccgacaccatgaag |
| | | ttctttctgtacgtgctggaaagcggcggaggcggctctgataagacacacac |
| | | atgtcctccatgtcctgctccagaagcagctggcggaccctctgttttcctgtttcc |
| | | acctaagccaaaggacaccctgatgatcagcagaacccctgaagtgacctg |
| | | cgtggtggtggatgtgaagcacgaggaccccgaagtgaagttcaattggtacg |
| | | tggacggcgtggaagtgcacaacgccaagaccaagcctagagaggaaca |
| | | gtacaacagcacctacagagtggtgtccgtgctgaccgtgctgcaccaggatt |
| | | ggctgaacggcaaagagtacaagtgcaaggtgtccaacaaggccctggcc |
| | | gctcctatcgagaaaaccatctctaaggccaagggccagcctcgggaacca |
| | | caggtttacaccctgcctccatgccgggaagagatgaccaagaatcaggtgtc |
| | | cctgtggtgcctggtcaagggcttctacccttccgatatcgccgtggaatgggag |
| | | agcaatggccagcctgagaacaactacaagaccacacctcctgtgctggac |
| | | agcgacggctcattcttcctgtacagcaagctgacagtggacaagagcagat |
| | | ggcagcagggcaacgtgttcagctgtagcgtgatgcacgaggccctgcacaa |
| | | ccactacacccagaagtctctgtctctgagccccggcaaa |

### 8.38. Example 38: Biophysical Properties of Modified Antibodies: SPR-Binding of Modified Antibodies of Example 37 to Human Fc Gamma Receptor 1A

[1105] Surface plasmon resonance (SPR) experiments were performed to analyze the interaction of human activating receptor FcγR1A towards WT and antibody-Fc variants. Binding kinetics and their relative binding affinities were explored. The binding affinity is an important characteristic of an interaction between an antibody and an antigen. The equilibrium dissociation constant (K_{D}) defines how strong the interaction is and therefore how much antibody-antigen complex is formed at equilibrium. The knowledge of the antibody characteristics is not only essential during selection of the best therapeutic antibody candidate, but also important to understand the in vivo behavior and potentially predict cellular immune responses. The aim is to generate antibody variants with no or low binding to Fc gamma receptor to reduce or eliminate effector function in hope of improving the safety of monoclonal antibody therapeutics.

[1106] All SPR buffers were prepared using deionized water. The samples were prepared in running buffer PBS pH 7.4 with 0.005% Tween-20. SPR measurements were measured on a Biacore T200 (GE-Healthcare Life Sciences) controlled by Biacore T200 control software version 2.0.1.

[1107] Surface plasmon resonance was conducted using a Biacore T200 to assess binding affinity of antibody WT and variants to human FcγR1A.

[1108] The antibodies were covalently immobilized on a CM5 sensor chip whereas Fc gamma receptor 1A served as analyte in solution (FIG. 38). Antibodies were diluted in 10 mM sodium acetate pH 4 and immobilized at a density of approximately 950 resonance units (RU) on the CM5 sensor chip applying a standard amine coupling procedure. Flow cell 1 was blank immobilized to serve as a reference. The kinetic binding data were collected by subsequent injections of 1:2 dilution series of the human Fc gamma receptor 1A on all flow cells at a flow rate of 30 μl/min and at a temperature of 25° C. The Fc gamma receptor was diluted in the running buffer at concentrations ranging from 0.2 nM to 25 nM. The chip surface was regenerated using 20 mM glycine pH 2.0 solution after each measuring cycle. Zero concentration samples (blank runs) were measured to allow double-referencing during data evaluation.

[1109] Data were evaluated using the Biacore T200 evaluation software. The raw data were double referenced, i.e. the response of the measuring flow cell was corrected for the response of the reference flow cell, and in a second step the response of a blank injection was subtracted. Then the sensorgrams were fitted by applying a 1:1 kinetic binding model to calculate dissociation equilibrium constants. In addition, the maximum response reached during the experiment was monitored. Maximum response describes the binding capacity of the surface in terms of the response at saturation.

[1110] The maximum response values summarizing these interactions are given in Table 34.

[1111] The SPR Biacore binding sensorgrams for each variant towards FcγR1A were depicted in FIG. 41.

[1112] All variants inhibit the binding to Fc gamma receptors compare to WT as low residual binding was measured.

TABLE 34
Maximum responses of WT-Fc and variants towards human
FcγRIA determined by surface plasmon resonance

| | Maximum response at |
|---|---|
| Fc | 25 nM hFcγRIA (RU) |
| WT | 138 |
| DANAPA | 0 |
| GADAPASK | 0 |
| LALA | 44 |
| LALASKPA | 0 |

### Differential Scanning Calorimetry-Melting Temperature of Modified Antibodies

[1113] The thermal stability of engineered antibodies CH2 domains were compared using calorimetric measurements as shown in Table 35. Calorimetric measurements were carried out on a differential scanning micro calorimeter (Nano DSC, TA instruments). The cell volume was 1 ml and the heating rate was 1° C./min. All proteins were used at a concentration of 1 mg/ml in PBS (pH 7.4). The molar heat capacity of each protein was estimated by comparison with duplicate samples containing identical buffer from which the protein had been omitted. The partial molar heat capacities and melting curves were analyzed using standard procedure. Thermograms were baseline corrected and concentration normalized. The silent version LALASKPA (68° C.) shows significantly better Tm compared to DANAPA (57° C.).

TABLE 35
Melting temperatures of WT-Fc and variants

| | Melting temperature (Tm) |
|---|---|
| Fc | of CH2 domain |
| WT | 68 |
| DANAPA | 57 |
| GADAPASK | 59 |
| LALA | 68 |
| LALASKPA | 68 |

### Aggregation Propensity Post Capture of Fc Variants

[1114] Size exclusion chromatography measurements were performed to evaluate the aggregation propensity (% HMW) of WT and Fc modified derivatives. The produced and purified antibodies were applied to an analytical size exclusion chromatography column (SEC 200, GE Healthcare), equilibrated with PBS buffer pH 7.4. Results are summarized in Table 36.

TABLE 36
Higher molecular weight content (%) of antibodies

| Fc | (%) higher molecular weight |
|---|---|
| WT | 16.3 |
| DANAPA | 22.7 |
| GADAPASK | 16.1 |
| LALA | 18.1 |
| LALASKPA | 18.9 |

### 8.39. Example 39: Anti-CD3 NFAT Signalling Assay

[1115] Jurkat reporter gene assay (RGA) for the nuclear factor of activated T-cells (NFAT) pathway was performed using Jurkat NFAT luciferized (JNL) cells and THP-1 cells (ATCC, TIB202). THP-1 cells express FcγRI, FcγRII, and FcγRIII. Cells were co-incubated for 6 hours at 37° C., 5% CO2 at a 5:1 effector to tumor cell ratio with each sample at the various concentrations depicted. An equal volume of ONE-Glo™ reagent (Promega, E6120) was added to the culture volume. Plate was shaken for 2 minutes, then incubated for an additional 8 minutes protected from light. Luciferase activity was quantitated on the Biotek Synergy HT plate reader. Data were analyzed and fit to a 4 parameter-logistic curve using GraphPad Prism.

[1116] In summary, WT showed the greatest NFAT activity. All silencing mutation sets showed significantly dampened NFAT activation. In the RGA, performed without IFNg (FIG. 42), all silencing mutation sets showed comparable T-cell activation with the exception of DANAPA.

### 8.40. Example 40: CD3hi TSP1 Variant

[1117] A CD3hi TSP1 variant comprising knob-into-hole mutations in the opposite Fc regions as compared to CD3hi TSP1 was produced. The amino acid sequences of the variant are set forth in Table 37.

TABLE 37

| | | SEQ |
|---|---|---|
| Chain | | ID |
| Description | Amino Acid Sequence | NO |
| First Half | QVQLVQSGAEVKKPGASVKVSCKASGYTFTTYWIQWVRQAPGQRLE | 1131 |
| Antibody | WMGAVYPGDADTRYTQKFQGRVTLTADRSASTAYMELSSLRSEDTA | |
| Heavy | VYYCGRDAGLEYYALDYWGQGTLVTVSSASTKGPSVFPLAPSSKST | |
| Chain | SGGTAALGCLVKDYFPEPVTVSWNSGALTSGVHTFPAVLQSSGLYSL | |
| (includes Fc | SSVVTVPSSSLGTQTYICNVNHKPSNTKVDKRVEPKSCGGGGSGGG | |
| sequence) | GSEVQLVESGGGLVQPGGSLKLSCAASGFTFNTYAMNWVRQASGK | |
| | GLEWVGRIRSKYNNYATYYADSVKDRFTISRDDSKSTLYLQMNSLKT | |
| | EDTAVYYCVRHGNFGNSYVSWFAYWGQGTLVTVSSGGGGSGGGG | |
| | SGGGGSGGGGSQAVVTQEPSLTVSPGGTVTLTCRSSTGAVTTSNYA | |
| | NWVQQKPGQAPRGLIGGTNKRAPWTPARFSGSLLGDKAALTLSGAQ | |
| | PEDEAEYFCALWYSNLWVFGGGTKLTVLGGGGSDKTHTCPPCPAPE | |
| | LLGGPSVFLFPPKPKDTLMISRTPEVTCVVVAVSHEDPEVKFNWYVD | |
| | GVEVHNAKTKPREEQYASTYRVVSVLTVLHQDWLNGKEYKCKVSNK | |
| | ALAAPIEKTISKAKGQPREPQVYTLPPCREEMTKNQVSLWCLVKGFY | |
| | PSDIAVEWESNGQPENNYKTTPPVLDSDGSFFLYSKLTVDKSRWQQ | |
| | GNVFSCSVMHEALHNHYTQKSLSLSPGK | |
| First Half | EIVMTQSPATLSVSPGERATLSCRASQDVGTAVAWYQQKPGQAPRL | 1132 |
| Antibody | LIYWASTRHTGIPARFSGSGSGTEFTLTISSLQSEDFAVYFCQQYANF | |
| Light Chain | PLYTFGQGTKLEIKRTVAAPSVFIFPPSDEQLKSGTASVVCLLNNFYP | |
| | REAKVQWKVDNALQSGNSQESVTEQDSKDSTYSLSSTLTLSKADYE | |
| | KHKVYACEVTHQGLSSPVTKSFNRGEC | |
| Second Half | SQQIYGVVYGNVTFHVPSNVPLKEVLWKKQKDKVAELENSEFRAFSS | 1133 |
| Antibody | FKNRVYLDTVSGSLTIYNLTSSDEDEYEMESPNITDTMKFFLYVLESG | |
| (includes Fc | GGGSDKTHTCPPCPAPELLGGPSVFLFPPKPKDTLMISRTPEVTCVV | |
| sequence) | VAVSHEDPEVKFNWYVDGVEVHNAKTKPREEQYASTYRVVSVLTVL | |
| | HQDWLNGKEYKCKVSNKALAAPIEKTISKAKGQPREPQVCTLPPSRE | |
| | EMTKNQVSLSCAVKGFYPSDIAVEWESNGQPENNYKTTPPVLDSDG | |
| | SFFLVSKLTVDKSRWQQGNVFSCSVMHEALHNHYTQKSLSLSPGK | |

### 8.41. Example 41: CD3hi TSP Variants

[1118] Additional Fc variants of CD3hi TSP1 are designed, and expressed and purified according to the methods described in Example 37. Amino acid sequences of the variants are set forth in Table 38.

TABLE 38
Exemplary TBM sequences

| SEQ ID | | |
|---|---|---|
| No | Description | Sequence |
| 1110 | Anti-CD19 light | eivmtqspatlsvspgeratlscrasqdvgtavawyqqkpgqaprlliywastr |
| | chain | htgiparfsgsgsgteftltisslqsedfavyfcqqyanfplytfgqgtkleikrtvaa |
| | Amino acid | psvfifppsdeqlksgtasvvcllnnfypreakvqwkvdnalqsgnsqesvteq |
| | sequence | dskdstyslsstltlskadyekhkvyacevthqglsspvtksfnrgec |
| 1134 | Anti-CD19-CD3 | qvqlvqsgaevkkpgasvkvsckasgytfttywiqwvrqapgqrlewmgav |
| | LALAGA IgG1 | ypgdadtrytqkfqgrvtltadrsastaymelsslrsedtavyycgrdagleyyal |
| | Heavy Chain | dywgqgtlvtvssastkgpsvfplapsskstsggtaalgclvkdyfpepvtvsw |
| | Amino acid | nsgaltsgvhtfpavlqssglyslssvvtvpssslgtqtyicnvnhkpsntkvdkr |
| | sequence | vepkscggggsggggsevalvesggglvqpggslklscaasgftfntyamn |
| | | wvrqasgkglewvgrirskynnyatyyadsvkdrftisrddskstlylqmnslkt |
| | | edtavyycvrhgnfgnsyvswfaywgqgtlvtvssggggsggggsggggsg |
| | | gggsqavvtqepsltvspggtvtltcrsstgavttsnyanwvqqkpgqaprglig |
| | | gtnkrapwtparfsgsllgdkaaltlsgaqpedeaeyfcalwysnlwvfgggtkl |
| | | tvlggggsdkthtcppcpapeaagapsvflfppkpkdtlmisrtpevtcvvvdv |
| | | shedpevkfnwyvdgvevhnaktkpreeqynstyrvvsvltvlhqdwlngke |
| | | ykckvsnkalpapiektiskakgqprepqvctlppsreemtknqvslscavkgf |
| | | ypsdiavewesngqpennykttppvldsdgsfflvskltvdksrwqqgnvfsc |
| | | svmhealhnhytqkslslspgk |
| 1135 | Anti-CD58 | sqqiygvvygnvtfhvpsnvplkevlwkkqkdkvaelensefrafssfknrvyl |
| | LALAGA IgG1 | dtvsgsltiynltssdedeyemespnitdtmkfflyvlesggggsdkthtcppcp |
| | Heavy Chain | apeaagapsvflfppkpkdtlmisrtpevtcvvvdvshedpevkfnwyvdgv |
| | Amino acid | evhnaktkpreeqynstyrvvsvltvlhqdwlngkeykckvsnkalpapiekti |
| | sequence | skakgqprepqvytlppcreemtknqvslwclvkgfypsdiavewesngqp |
| | | ennykttppvldsdgsfflyskltvdksrwqqgnvfscsvmhealhnhytqksl |
| | | slspgk |
| 1136 | Anti-CD19-CD3 | qvqlvqsgaevkkpgasvkvsckasgytfttywiqwvrqapgqrlewmgav |
| | DAPASK IgG1 | ypgdadtrytqkfqgrvtltadrsastaymelsslrsedtavyycgrdagleyyal |
| | Heavy Chain | dywgqgtlvtvssastkgpsvfplapsskstsggtaalgclvkdyfpepvtvsw |
| | Amino acid | nsgaltsgvhtfpavlqssglyslssvvtvpssslgtqtyicnvnhkpsntkvdkr |
| | sequence | vepkscggggsggggsevqlvesggglvqpggslklscaasgftfntyamn |
| | | wvrqasgkglewvgrirskynnyatyyadsvkdrftisrddskstlylqmnslkt |
| | | edtavyycvrhgnfgnsyvswfaywgqgtlvtvssggggsggggggggsg |
| | | gggsqavvtqepsltvspggtvtltcrsstgavttsnyanwvqqkpgqaprglig |
| | | gtnkrapwtparfsgsllgdkaaltlsgaqpedeaeyfcalwysnlwvfgggtkl |
| | | tvlggggsdkthtcppcpapellggpsvflfppkpkdtlmisrtpevtcvvvavk |
| | | hedpevkfnwyvdgvevhnaktkpreeqynstyrvvsvltvlhqdwlngkey |
| | | kckvsnkalaapiektiskakgqprepqvctlppsreemtknqvslscavkgfy |
| | | psdiavewesngqpennykttppvldsdgsfflvskltvdksrwqqgnvfscs |
| | | vmhealhnhytqkslslspgk |
| 1137 | Anti-CD58 | sqqiygvvygnvtfhvpsnvplkevlwkkqkdkvaelensefrafssfknrvyl |
| | DAPASK IgG1 | dtvsgsltiynltssdedeyemespnitdtmkfflyvlesggggsdkthtcppcp |
| | Heavy Chain | apellggpsvflfppkpkdtlmisrtpevtcvvvavkhedpevkfnwyvdgvev |
| | Amino acid | hnaktkpreeqynstyrvvsvltvlhqdwlngkeykckvsnkalaapiektisk |
| | sequence | akgqprepqvytlppcreemtknqvslwclvkgfypsdiavewesngqpen |
| | | nykttppvldsdgsfflyskltvdksrwqqgnvfscsvmhealhnhytqkslsls |
| | | pgk |
| 1138 | Anti-CD19-CD3 | qvqlvqsgaevkkpgasvkvsckasgytfttywiqwvrqapgqrlewmgav |
| | GADAPA IgG1 | ypgdadtrytqkfqgrvtltadrsastaymelsslrsedtavyycgrdagleyyal |
| | Heavy Chain | dywgqgtlvtvssastkgpsvfplapsskstsggtaalgclvkdyfpepvtvsw |
| | Amino acid | nsgaltsgvhtfpavlqssglyslssvvtvpssslgtqtyicnvnhkpsntkvdkr |
| | sequence | vepkscggggsggggsevqlvesggglvqpggslklscaasgftfntyamn |
| | | wvrqasgkglewvgrirskynnyatyyadsvkdrftisrddskstlylqmnslkt |
| | | edtavyycvrhgnfgnsyvswfaywgqgtlvtvssggggggggsggggsg |
| | | gggsqavvtqepsltvspggtvtltcrsstgavttsnyanwvqqkpgqaprglig |
| | | gtnkrapwtparfsgsllgdkaaltlsgaqpedeaeyfcalwysnlwvfgggtkl |
| | | tvlggggsdkthtcppcpapellgapsvflfppkpkdtlmisrtpevtcvvvavs |
| | | hedpevkfnwyvdgvevhnaktkpreeqynstyrvvsvltvlhqdwlngkey |
| | | kckvsnkalaapiektiskakgqprepqvctlppsreemtknqvslscavkgfy |
| | | psdiavewesngqpennykttppvldsdgsfflvskltvdksrwqqgnvfscs |
| | | vmhealhnhytqkslslspgk |
| 1139 | Anti-CD58 | sqqiygvvygnvtfhvpsnvplkevlwkkqkdkvaelensefrafssfknrvyl |
| | GADAPA IgG1 | dtvsgsltiynltssdedeyemespnitdtmkfflyvlesggggsdkthtcppcp |
| | Heavy Chain | apellgapsvflfppkpkdtlmisrtpevtcvvvavshedpevkfnwyvdgvev |
| | Amino acid | hnaktkpreeqynstyrvvsvltvlhqdwlngkeykckvsnkalaapiektisk |
| | sequence | akgqprepqvytlppcreemtknqvslwclvkgfypsdiavewesngqpen |
| | | nykttppvldsdgsfflyskltvdksrwqqgnvfscsvmhealhnhytqkslsls |
| | | pgk |
| 1140 | Anti-CD19-CD3 | qvqlvqsgaevkkpgasvkvsckasgytfttywiqwvrqapgqrlewmgav |
| | LALAPG IgG1 | ypgdadtrytqkfqgrvtltadrsastaymelsslrsedtavyycgrdagleyyal |
| | Heavy Chain | dywgqgtlvtvssastkgpsvfplapsskstsggtaalgclvkdyfpepvtvsw |
| | Amino acid | nsgaltsgvhtfpavlqssglyslssvvtvpssslgtqtyicnvnhkpsntkvdkr |
| | sequence | vepkscggggsggggsevalvesggglvqpggslklscaasgftfntyamn |
| | | wvrqasgkglewvgrirskynnyatyyadsvkdrftisrddskstlylqmnslkt |
| | | edtavyycvrhgnfgnsyvswfaywgqgtlvtvssggggsggggsggggsg |
| | | gggsqavvtqepsltvspggtvtltcrsstgavttsnyanwvqqkpgqaprglig |
| | | gtnkrapwtparfsgsllgdkaaltlsgaqpedeaeyfcalwysnlwvfgggtkl |
| | | tvlggggsdkthtcppcpapeaaggpsvflfppkpkdtlmisrtpevtcvvvdv |
| | | shedpevkfnwyvdgvevhnaktkpreeqynstyrvvsvltvlhqdwlngke |
| | | ykckvsnkalgapiektiskakgqprepqvctlppsreemtknqvslscavkgf |
| | | ypsdiavewesngqpennykttppvldsdgsfflvskltvdksrwqqgnvfsc |
| | | svmhealhnhytqkslslspgk |
| 1141 | Anti-CD58 | sqqiygvvygnvtfhvpsnvplkevlwkkqkdkvaelensefrafssfknrvyl |
| | LALAPG IgG1 | dtvsgsltiynltssdedeyemespnitdtmkfflyvlesggggsdkthtcppcp |
| | Heavy Chain | apeaaggpsvflfppkpkdtlmisrtpevtcvvvdvshedpevkfnwyvdgv |
| | Amino acid | evhnaktkpreeqynstyrvvsvltvlhqdwlngkeykckvsnkalgapiekti |
| | sequence | skakgqprepqvytlppcreemtknqvslwclvkgfypsdiavewesngqp |
| | | ennykttppvldsdgsfflyskltvdksrwqqgnvfscsvmhealhnhytqksl |
| | | slspgk |
| 1142 | Anti-CD19-CD3 | qvqlvqsgaevkkpgasvkvsckasgytfttywiqwvrqapgqrlewmgav |
| | LALAPA IgG1 | ypgdadtrytqkfqgrvtltadrsastaymelsslrsedtavyycgrdagleyyal |
| | Heavy Chain | dywgqgtlvtvssastkgpsvfplapsskstsggtaalgclvkdyfpepvtvsw |
| | Amino acid | nsgaltsgvhtfpavlqssglyslssvvtvpssslgtqtyicnvnhkpsntkvdkr |
| | sequence | vepkscggggsggggsevalvesggglvqpggslklscaasgftfntyamn |
| | | wvrqasgkglewvgrirskynnyatyyadsvkdrftisrddskstlylqmnslkt |
| | | edtavyycvrhgnfgnsyvswfaywgqgtlvtvssggggsggggsggggsg |
| | | gggsqavvtqepsltvspggtvtltcrsstgavttsnyanwvqqkpgqaprglig |
| | | gtnkrapwtparfsgsllgdkaaltlsgaqpedeaeyfcalwysnlwvfgggtkl |
| | | tvlggggsdkthtcppcpapeaaggpsvflfppkpkdtlmisrtpevtcvvvdv |
| | | shedpevkfnwyvdgvevhnaktkpreeqynstyrvvsvltvlhqdwlngke |
| | | ykckvsnkalaapiektiskakgqprepqvctlppsreemtknqvslscavkgf |
| | | ypsdiavewesngqpennykttppvldsdgsfflvskltvdksrwqqgnvfsc |
| | | svmhealhnhytqkslslspgk |
| 1143 | Anti-CD58 | sqqiygvvygnvtfhvpsnvplkevlwkkqkdkvaelensefrafssfknrvyl |
| | LALAPA IgG1 | dtvsgsltiynltssdedeyemespnitdtmkfflyvlesggggsdkthtcppcp |
| | Heavy Chain | apeaaggpsvflfppkpkdtlmisrtpevtcvvvdvshedpevkfnwyvdgv |
| | Amino acid | evhnaktkpreeqynstyrvvsvltvlhqdwlngkeykckvsnkalaapiekti |
| | sequence | skakgqprepqvytlppcreemtknqvslwclvkgfypsdiavewesngqp |
| | | ennykttppvldsdgsfflyskltvdksrwqqgnvfscsvmhealhnhytqksl |
| | | slspgk |

### 9. SPECIFIC EMBODIMENTS, CITATION OF REFERENCES

[1119] While various specific embodiments have been illustrated and described, it will be appreciated that various changes can be made without departing from the spirit and scope of the disclosure(s).

[1120] The present disclosure is exemplified by the numbered embodiments set forth below.

[1121] 1. A CD19 binding molecule that specifically binds to human CD19 and comprises
[1122] (a) CDR-H1, CDR-H2, and CDR-H3 having the amino acid sequences of SEQ ID NO:1, SEQ ID NO:2, and SEQ ID NO:3, and CDR-L1, CDR-L2, and CDR-L3 having the amino acid sequences of SEQ ID NO:14, SEQ ID NO:15, and SEQ ID NO:16; and
[1123] (b) a first variant human IgG1 Fc region and a second variant human IgG1 Fc region forming a Fc domain, wherein the first and second variant Fc regions comprise L234A, L235A, and G237A (“LALAGA”) substitutions, L234A, L235A, S267K, and P329A (“LALASKPA”) substitutions, D265A, P329A, and S267K (“DAPASK”) substitutions, G237A, D265A, and P329A (“GADAPA”) substitutions, G237A, D265A, P329A, and S267K (“GADAPASK”) substitutions, L234A, L235A, and P329G (“LALAPG”) substitutions, or L234A, L235A, and P329A (“LALAPA”) substitutions, wherein the amino acid residues are numbered according to the EU numbering system.

[1124] 2. A CD19 binding molecule that specifically binds to human CD19 and comprises
[1125] (a) CDR-H1, CDR-H2, and CDR-H3 having the amino acid sequences of SEQ ID NO:4, SEQ ID NO:5, and SEQ ID NO:6, and CDR-L1, CDR-L2, and CDR-L3 having the amino acid sequences of SEQ ID NO:17, SEQ ID NO:18, and SEQ ID NO:19; and
[1126] (b) a first variant human IgG1 Fc region and a second variant human IgG1 Fc region forming a Fc domain, wherein the first and second variant Fc regions comprise L234A, L235A, and G237A (“LALAGA”) substitutions, L234A, L235A, S267K, and P329A (“LALASKPA”) substitutions, D265A, P329A, and S267K (“DAPASK”) substitutions, G237A, D265A, and P329A (“GADAPA”) substitutions, G237A, D265A, P329A, and S267K (“GADAPASK”) substitutions, L234A, L235A, and P329G (“LALAPG”) substitutions, or L234A, L235A, and P329A (“LALAPA”) substitutions, wherein the amino acid residues are numbered according to the EU numbering system.

[1127] 3. A CD19 binding molecule that specifically binds to human CD19 and comprises
[1128] (a) CDR-H1, CDR-H2, and CDR-H3 having the amino acid sequences of SEQ ID NO:7, SEQ ID NO:8, and SEQ ID NO:9, and CDR-L1, CDR-L2, and CDR-L3 having the amino acid sequences of SEQ ID NO:20, SEQ ID NO:21, and SEQ ID NO:22; and
[1129] (b) a first variant human IgG1 Fc region and a second variant human IgG1 Fc region forming a Fc domain, wherein the first and second variant Fc regions comprise L234A, L235A, and G237A (“LALAGA”) substitutions, L234A, L235A, S267K, and P329A (“LALASKPA”) substitutions, D265A, P329A, and S267K (“DAPASK”) substitutions, G237A, D265A, and P329A (“GADAPA”) substitutions, G237A, D265A, P329A, and S267K (“GADAPASK”) substitutions, L234A, L235A, and P329G (“LALAPG”) substitutions, or L234A, L235A, and P329A (“LALAPA”) substitutions, wherein the amino acid residues are numbered according to the EU numbering system.

[1130] 4. A CD19 binding molecule that specifically binds to human CD19 and comprises
[1131] (a) CDR-H1, CDR-H2, and CDR-H3 having the amino acid sequences of SEQ ID NO:10, SEQ ID NO:11, and SEQ ID NO:12, and CDR-L1, CDR-L2, and CDR-L3 having the amino acid sequences of SEQ ID NO:23, SEQ ID NO:24, and SEQ ID NO:25; and
[1132] (b) a first human IgG1 variant Fc region and a second human IgG1 variant Fc region forming a Fc domain, wherein the first and second variant Fc regions comprise L234A, L235A, and G237A (“LALAGA”) substitutions, L234A, L235A, S267K, and P329A (“LALASKPA”) substitutions, D265A, P329A, and S267K (“DAPASK”) substitutions, G237A, D265A, and P329A (“GADAPA”) substitutions, G237A, D265A, P329A, and S267K (“GADAPASK”) substitutions, L234A, L235A, and P329G (“LALAPG”) substitutions, or L234A, L235A, and P329A (“LALAPA”) substitutions, wherein the amino acid residues are numbered according to the EU numbering system.

[1133] 5. The CD19 binding molecule of any one of embodiments 1 to 4, which comprises a VH having the amino acid sequence of SEQ ID NO:13.

[1134] 6. The CD19 binding molecule of any one of embodiments 1 to 5, which comprises a VL having the amino acid sequence of SEQ ID NO:26.

[1135] 7. A CD19 binding molecule that specifically binds to human CD19 and comprises
[1136] (a) CDR-H1, CDR-H2, and CDR-H3 having the amino acid sequences of SEQ ID NO:27, SEQ ID NO:28, and SEQ ID NO:29, and CDR-L1, CDR-L2, and CDR-L3 having the amino acid sequences of SEQ ID NO:40, SEQ ID NO:41, and SEQ ID NO:42; and
[1137] (b) a first human IgG1 variant Fc region and a second human IgG1 variant Fc region forming a Fc domain, wherein the first and second variant Fc regions comprise L234A, L235A, and G237A (“LALAGA”) substitutions, L234A, L235A, S267K, and P329A (“LALASKPA”) substitutions, D265A, P329A, and S267K (“DAPASK”) substitutions, G237A, D265A, and P329A (“GADAPA”) substitutions, G237A, D265A, P329A, and S267K (“GADAPASK”) substitutions, L234A, L235A, and P329G (“LALAPG”) substitutions, or L234A, L235A, and P329A (“LALAPA”) substitutions, wherein the amino acid residues are numbered according to the EU numbering system.

[1138] 8. A CD19 binding molecule that specifically binds to human CD19 and comprises
[1139] (a) CDR-H1, CDR-H2, and CDR-H3 having the amino acid sequences of SEQ ID NO:30, SEQ ID NO:31, and SEQ ID NO:32, and CDR-L1, CDR-L2, and CDR-L3 having the amino acid sequences of SEQ ID NO:43, SEQ ID NO:44, and SEQ ID NO:45; and
[1140] (b) a first variant human IgG1 Fc region and a second variant human IgG1 Fc region forming a Fc domain, wherein the first and second variant Fc regions comprise L234A, L235A, and G237A (“LALAGA”) substitutions, L234A, L235A, S267K, and P329A (“LALASKPA”) substitutions, D265A, P329A, and S267K (“DAPASK”) substitutions, G237A, D265A, and P329A (“GADAPA”) substitutions, G237A, D265A, P329A, and S267K (“GADAPASK”) substitutions, L234A, L235A, and P329G (“LALAPG”) substitutions, or L234A, L235A, and P329A (“LALAPA”) substitutions, wherein the amino acid residues are numbered according to the EU numbering system.

[1141] 9. A CD19 binding molecule that specifically binds to human CD19 and comprises
[1142] (a) CDR-H1, CDR-H2, and CDR-H3 having the amino acid sequences of SEQ ID NO:33, SEQ ID NO:34, and SEQ ID NO:35, and CDR-L1, CDR-L2, and CDR-L3 having the amino acid sequences of SEQ ID NO:46, SEQ ID NO:47, and SEQ ID NO:48; and
[1143] (b) a first variant human IgG1 Fc region and a second variant human IgG1 Fc region forming a Fc domain, wherein the first and second variant Fc regions comprise L234A, L235A, and G237A (“LALAGA”) substitutions, L234A, L235A, S267K, and P329A (“LALASKPA”) substitutions, D265A, P329A, and S267K (“DAPASK”) substitutions, G237A, D265A, and P329A (“GADAPA”) substitutions, G237A, D265A, P329A, and S267K (“GADAPASK”) substitutions, L234A, L235A, and P329G (“LALAPG”) substitutions, or L234A, L235A, and P329A (“LALAPA”) substitutions, wherein the amino acid residues are numbered according to the EU numbering system.

[1144] 10. A CD19 binding molecule that specifically binds to human CD19 and comprises
[1145] (a) CDR-H1, CDR-H2, and CDR-H3 having the amino acid sequences of SEQ ID NO:36, SEQ ID NO:37, and SEQ ID NO:38, and CDR-L1, CDR-L2, and CDR-L3 having the amino acid sequences of SEQ ID NO:49, SEQ ID NO:50, and SEQ ID NO:51; and
[1146] (b) a first variant human IgG1 Fc region and a second variant human IgG1 Fc region forming a Fc domain, wherein the first and second variant Fc regions comprise L234A, L235A, and G237A (“LALAGA”) substitutions, L234A, L235A, S267K, and P329A (“LALASKPA”) substitutions, D265A, P329A, and S267K (“DAPASK”) substitutions, G237A, D265A, and P329A (“GADAPA”) substitutions, G237A, D265A, P329A, and S267K (“GADAPASK”) substitutions, L234A, L235A, and P329G (“LALAPG”) substitutions, or L234A, L235A, and P329A (“LALAPA”) substitutions, wherein the amino acid residues are numbered according to the EU numbering system.

[1147] 11. The CD19 binding molecule of any one of embodiments 7 to 10, which comprises a VH having the amino acid sequence of SEQ ID NO:39.

[1148] 12. The CD19 binding molecule of any one of embodiments 7 to 11, which comprises a VL having the amino acid sequence of SEQ ID NO:52.

[1149] 13. The CD19 binding molecule of any one of embodiments 1 to 12, which comprises an antibody, an antibody fragment, an scFv, a dsFv, a Fv, a Fab, an scFab, a (Fab′)2, or a single domain antibody (SDAB).

[1150] 14. The CD19 binding molecule of embodiment 13, which comprises an antibody or an antigen-binding domain thereof.

[1151] 15. The CD19 binding molecule of embodiment 13, which comprises a scFv.

[1152] 16. The CD19 binding molecule of any one of embodiments 1 to 12, which is a multispecific binding molecule (MBM) comprising:
[1153] (a) an antigen-binding module 1 (ABM1) that binds specifically to CD19; and
[1154] (b) an antigen-binding module 2 (ABM2) that binds specifically to a different target molecule, optionally wherein the target molecule is a component of a human T-cell receptor (TCR) complex.

[1155] 17. The CD19 binding molecule of embodiment 16, wherein ABM1 is an antibody, an antibody fragment, an scFv, a dsFv, a Fv, a Fab, an scFab, a (Fab′)2, a single domain antibody (SDAB), a VH or VL domain, or a camelid VHH domain.

[1156] 18. The CD19 binding molecule of embodiment 17, wherein ABM1 is an scFv.

[1157] 19. The CD19 binding molecule of embodiment 17, wherein ABM1 is a Fab.

[1158] 20. The CD19 binding molecule of embodiment 17, wherein the Fab is a Fab heterodimer.

[1159] 21. The CD19 binding molecule of embodiment 17, wherein ABM1 is an anti-CD19 antibody or an antigen-binding domain thereof.

[1160] 22. The CD19 binding molecule of any one of embodiments 16 to 21, wherein ABM2 is a non-immunoglobulin scaffold based ABM.

[1161] 23. The CD19 binding molecule of embodiment 22, wherein ABM2 is a Kunitz domain, an Adnexin, an Affibody, a DARPin, an Avimer, an Anticalin, a Lipocalin, a Centyrin, a Versabody, a Knottin, an Adnectin, a Pronectin, an Affitin/Nanofitin, an Affilin, an Atrimer/Tetranectin, a bicyclic peptide, a cys-knot, a Fn3 scaffold, an Obody, a Tn3, an Affimer, BD, an Adhiron, a Duocalin, an Alphabody, an Armadillo Repeat Protein, a Repebody, or a Fynomer

[1162] 24. The CD19 binding molecule of any one of embodiments 16 to 21, wherein ABM2 is an immunoglobulin scaffold based ABM.

[1163] 25. The CD19 binding molecule of embodiment 24, wherein ABM2 is an antibody, an antibody fragment, an scFv, a dsFv, a Fv, a Fab, an scFab, a (Fab′)2, a single domain antibody (SDAB), a VH or VL domain, or a camelid VHH domain.

[1164] 26. The CD19 binding molecule of embodiment 25, wherein ABM2 is an antibody or an antigen-binding domain thereof.

[1165] 27. The CD19 binding molecule of embodiment 25, wherein ABM2 is an scFv.

[1166] 28. The CD19 binding molecule of embodiment 25, wherein ABM2 is a Fab.

[1167] 29. The CD19 binding molecule of embodiment 25, wherein ABM2 is a Fab heterodimer.

[1168] 30. The CD19 binding molecule of any one of embodiments 16 to 29, in which ABM2 binds specifically to a component of a human T-cell receptor (TCR) complex.

[1169] 31. The CD19 binding molecule of embodiment 30, wherein the component of the TCR complex is CD3.

[1170] 32. The CD19 binding molecule of embodiment 31, wherein ABM2 comprises the CDR sequences of CD3-1.

[1171] 33. The CD19 binding molecule of embodiment 31, wherein ABM2 comprises the CDR sequences of CD3-2.

[1172] 34. The CD19 binding molecule of embodiment 31, wherein ABM2 comprises the CDR sequences of CD3-3.

[1173] 35. The CD19 binding molecule of embodiment 31, wherein ABM2 comprises the CDR sequences of CD3-4.

[1174] 36. The CD19 binding molecule of embodiment 31, wherein ABM2 comprises the CDR sequences of CD3-5.

[1175] 37. The CD19 binding molecule of embodiment 31, wherein ABM2 comprises the CDR sequences of CD3-6.

[1176] 38. The CD19 binding molecule of embodiment 31, wherein ABM2 comprises the CDR sequences of CD3-7.

[1177] 39. The CD19 binding molecule of embodiment 31, wherein ABM2 comprises the CDR sequences of CD3-8.

[1178] 40. The CD19 binding molecule of embodiment 31, wherein ABM2 comprises the CDR sequences of CD3-9.

[1179] 41. The CD19 binding molecule of embodiment 31, wherein ABM2 comprises the CDR sequences of CD3-10.

[1180] 42. The CD19 binding molecule of embodiment 31, wherein ABM2 comprises the CDR sequences of CD3-11.

[1181] 43. The CD19 binding molecule of embodiment 31, wherein ABM2 comprises the CDR sequences of CD3-12.

[1182] 44. The CD19 binding molecule of embodiment 31, wherein ABM2 comprises the CDR sequences of CD3-13.

[1183] 45. The CD19 binding molecule of embodiment 31, wherein ABM2 comprises the CDR sequences of CD3-14.

[1184] 46. The CD19 binding molecule of embodiment 31, wherein ABM2 comprises the CDR sequences of CD3-15.

[1185] 47. The CD19 binding molecule of embodiment 31, wherein ABM2 comprises the CDR sequences of CD3-16.

[1186] 48. The CD19 binding molecule of embodiment 31, wherein ABM2 comprises the CDR sequences of CD3-17.

[1187] 49. The CD19 binding molecule of embodiment 31, wherein ABM2 comprises the CDR sequences of CD3-18.

[1188] 50. The CD19 binding molecule of embodiment 31, wherein ABM2 comprises the CDR sequences of CD3-19.

[1189] 51. The CD19 binding molecule of embodiment 31, wherein ABM2 comprises the CDR sequences of CD3-20.

[1190] 52. The CD19 binding molecule of embodiment 31, wherein ABM2 comprises the CDR sequences of CD3-21.

[1191] 53. The CD19 binding molecule of embodiment 31, wherein ABM2 comprises the CDR sequences of CD3-22.

[1192] 54. The CD19 binding molecule of embodiment 31, wherein ABM2 comprises the CDR sequences of CD3-23.

[1193] 55. The CD19 binding molecule of embodiment 31, wherein ABM2 comprises the CDR sequences of CD3-24.

[1194] 56. The CD19 binding molecule of embodiment 31, wherein ABM2 comprises the CDR sequences of CD3-25.

[1195] 57. The CD19 binding molecule of embodiment 31, wherein ABM2 comprises the CDR sequences of CD3-26.

[1196] 58. The CD19 binding molecule of embodiment 31, wherein ABM2 comprises the CDR sequences of CD3-27.

[1197] 59. The CD19 binding molecule of embodiment 31, wherein ABM2 comprises the CDR sequences of CD3-28.

[1198] 60. The CD19 binding molecule of embodiment 31, wherein ABM2 comprises the CDR sequences of CD3-29.

[1199] 61. The CD19 binding molecule of embodiment 31, wherein ABM2 comprises the CDR sequences of CD3-30.

[1200] 62. The CD19 binding molecule of embodiment 31, wherein ABM2 comprises the CDR sequences of CD3-31.

[1201] 63. The CD19 binding molecule of embodiment 31, wherein ABM2 comprises the CDR sequences of CD3-32.

[1202] 64. The CD19 binding molecule of embodiment 31, wherein ABM2 comprises the CDR sequences of CD3-33.

[1203] 65. The CD19 binding molecule of embodiment 31, wherein ABM2 comprises the CDR sequences of CD3-34.

[1204] 66. The CD19 binding molecule of embodiment 31, wherein ABM2 comprises the CDR sequences of CD3-35.

[1205] 67. The CD19 binding molecule of embodiment 31, wherein ABM2 comprises the CDR sequences of CD3-36.

[1206] 68. The CD19 binding molecule of embodiment 31, wherein ABM2 comprises the CDR sequences of CD3-37.

[1207] 69. The CD19 binding molecule of embodiment 31, wherein ABM2 comprises the CDR sequences of CD3-38.

[1208] 70. The CD19 binding molecule of embodiment 31, wherein ABM2 comprises the CDR sequences of CD3-39.

[1209] 71. The CD19 binding molecule of embodiment 31, wherein ABM2 comprises the CDR sequences of CD3-40.

[1210] 72. The CD19 binding molecule of embodiment 31, wherein ABM2 comprises the CDR sequences of CD3-41.

[1211] 73. The CD19 binding molecule of embodiment 31, wherein ABM2 comprises the CDR sequences of CD3-42.

[1212] 74. The CD19 binding molecule of embodiment 31, wherein ABM2 comprises the CDR sequences of CD3-43.

[1213] 75. The CD19 binding molecule of embodiment 31, wherein ABM2 comprises the CDR sequences of CD3-44.

[1214] 76. The CD19 binding molecule of embodiment 31, wherein ABM2 comprises the CDR sequences of CD3-45.

[1215] 77. The CD19 binding molecule of embodiment 31, wherein ABM2 comprises the CDR sequences of CD3-46.

[1216] 78. The CD19 binding molecule of embodiment 31, wherein ABM2 comprises the CDR sequences of CD3-47.

[1217] 79. The CD19 binding molecule of embodiment 31, wherein ABM2 comprises the CDR sequences of CD3-48.

[1218] 80. The CD19 binding molecule of embodiment 31, wherein ABM2 comprises the CDR sequences of CD3-49.

[1219] 81. The CD19 binding molecule of embodiment 31, wherein ABM2 comprises the CDR sequences of CD3-50.

[1220] 82. The CD19 binding molecule of embodiment 31, wherein ABM2 comprises the CDR sequences of CD3-51.

[1221] 83. The CD19 binding molecule of embodiment 31, wherein ABM2 comprises the CDR sequences of CD3-52.

[1222] 84. The CD19 binding molecule of embodiment 31, wherein ABM2 comprises the CDR sequences of CD3-53.

[1223] 85. The CD19 binding molecule of embodiment 31, wherein ABM2 comprises the CDR sequences of CD3-54.

[1224] 86. The CD19 binding molecule of embodiment 31, wherein ABM2 comprises the CDR sequences of CD3-55.

[1225] 87. The CD19 binding molecule of embodiment 31, wherein ABM2 comprises the CDR sequences of CD3-56.

[1226] 88. The CD19 binding molecule of embodiment 31, wherein ABM2 comprises the CDR sequences of CD3-57.

[1227] 89. The CD19 binding molecule of embodiment 31, wherein ABM2 comprises the CDR sequences of CD3-58.

[1228] 90. The CD19 binding molecule of embodiment 31, wherein ABM2 comprises the CDR sequences of CD3-59.

[1229] 91. The CD19 binding molecule of embodiment 31, wherein ABM2 comprises the CDR sequences of CD3-60.

[1230] 92. The CD19 binding molecule of embodiment 31, wherein ABM2 comprises the CDR sequences of CD3-61.

[1231] 93. The CD19 binding molecule of embodiment 31, wherein ABM2 comprises the CDR sequences of CD3-62.

[1232] 94. The CD19 binding molecule of embodiment 31, wherein ABM2 comprises the CDR sequences of CD3-63.

[1233] 95. The CD19 binding molecule of embodiment 31, wherein ABM2 comprises the CDR sequences of CD3-64.

[1234] 96. The CD19 binding molecule of embodiment 31, wherein ABM2 comprises the CDR sequences of CD3-65.

[1235] 97. The CD19 binding molecule of embodiment 31, wherein ABM2 comprises the CDR sequences of CD3-66.

[1236] 98. The CD19 binding molecule of embodiment 31, wherein ABM2 comprises the CDR sequences of CD3-67.

[1237] 99. The CD19 binding molecule of embodiment 31, wherein ABM2 comprises the CDR sequences of CD3-68.

[1238] 100. The CD19 binding molecule of embodiment 31, wherein ABM2 comprises the CDR sequences of CD3-69.

[1239] 101. The CD19 binding molecule of embodiment 31, wherein ABM2 comprises the CDR sequences of CD3-70.

[1240] 102. The CD19 binding molecule of embodiment 31, wherein ABM2 comprises the CDR sequences of CD3-71.

[1241] 103. The CD19 binding molecule of embodiment 31, wherein ABM2 comprises the CDR sequences of CD3-72.

[1242] 104. The CD19 binding molecule of embodiment 31, wherein ABM2 comprises the CDR sequences of CD3-73.

[1243] 105. The CD19 binding molecule of embodiment 31, wherein ABM2 comprises the CDR sequences of CD3-74.

[1244] 106. The CD19 binding molecule of embodiment 31, wherein ABM2 comprises the CDR sequences of CD3-75.

[1245] 107. The CD19 binding molecule of embodiment 31, wherein ABM2 comprises the CDR sequences of CD3-76.

[1246] 108. The CD19 binding molecule of embodiment 31, wherein ABM2 comprises the CDR sequences of CD3-77.

[1247] 109. The CD19 binding molecule of embodiment 31, wherein ABM2 comprises the CDR sequences of CD3-78.

[1248] 110. The CD19 binding molecule of embodiment 31, wherein ABM2 comprises the CDR sequences of CD3-79.

[1249] 111. The CD19 binding molecule of embodiment 31, wherein ABM2 comprises the CDR sequences of CD3-80.

[1250] 112. The CD19 binding molecule of embodiment 31, wherein ABM2 comprises the CDR sequences of CD3-81.

[1251] 113. The CD19 binding molecule of embodiment 31, wherein ABM2 comprises the CDR sequences of CD3-82.

[1252] 114. The CD19 binding molecule of embodiment 31, wherein ABM2 comprises the CDR sequences of CD3-83.

[1253] 115. The CD19 binding molecule of embodiment 31, wherein ABM2 comprises the CDR sequences of CD3-84.

[1254] 116. The CD19 binding molecule of embodiment 31, wherein ABM2 comprises the CDR sequences of CD3-85.

[1255] 117. The CD19 binding molecule of embodiment 31, wherein ABM2 comprises the CDR sequences of CD3-86.

[1256] 118. The CD19 binding molecule of embodiment 31, wherein ABM2 comprises the CDR sequences of CD3-87.

[1257] 119. The CD19 binding molecule of embodiment 31, wherein ABM2 comprises the CDR sequences of CD3-88.

[1258] 120. The CD19 binding molecule of embodiment 31, wherein ABM2 comprises the CDR sequences of CD3-89.

[1259] 121. The CD19 binding molecule of embodiment 31, wherein ABM2 comprises the CDR sequences of CD3-90.

[1260] 122. The CD19 binding molecule of embodiment 31, wherein ABM2 comprises the CDR sequences of CD3-91.

[1261] 123. The CD19 binding molecule of embodiment 31, wherein ABM2 comprises the CDR sequences of CD3-92.

[1262] 124. The CD19 binding molecule of embodiment 31, wherein ABM2 comprises the CDR sequences of CD3-93.

[1263] 125. The CD19 binding molecule of embodiment 31, wherein ABM2 comprises the CDR sequences of CD3-94.

[1264] 126. The CD19 binding molecule of embodiment 31, wherein ABM2 comprises the CDR sequences of CD3-95.

[1265] 127. The CD19 binding molecule of embodiment 31, wherein ABM2 comprises the CDR sequences of CD3-96.

[1266] 128. The CD19 binding molecule of embodiment 31, wherein ABM2 comprises the CDR sequences of CD3-97.

[1267] 129. The CD19 binding molecule of embodiment 31, wherein ABM2 comprises the CDR sequences of CD3-98.

[1268] 130. The CD19 binding molecule of embodiment 31, wherein ABM2 comprises the CDR sequences of CD3-99.

[1269] 131. The CD19 binding molecule of embodiment 31, wherein ABM2 comprises the CDR sequences of CD3-100.

[1270] 132. The CD19 binding molecule of embodiment 31, wherein ABM2 comprises the CDR sequences of CD3-101.

[1271] 133. The CD19 binding molecule of embodiment 31, wherein ABM2 comprises the CDR sequences of CD3-102.

[1272] 134. The CD19 binding molecule of embodiment 31, wherein ABM2 comprises the CDR sequences of CD3-103.

[1273] 135. The CD19 binding molecule of embodiment 31, wherein ABM2 comprises the CDR sequences of CD3-104.

[1274] 136. The CD19 binding molecule of embodiment 31, wherein ABM2 comprises the CDR sequences of CD3-105.

[1275] 137. The CD19 binding molecule of embodiment 31, wherein ABM2 comprises the CDR sequences of CD3-106.

[1276] 138. The CD19 binding molecule of embodiment 31, wherein ABM2 comprises the CDR sequences of CD3-107.

[1277] 139. The CD19 binding molecule of embodiment 31, wherein ABM2 comprises the CDR sequences of CD3-108.

[1278] 140. The CD19 binding molecule of embodiment 31, wherein ABM2 comprises the CDR sequences of CD3-109.

[1279] 141. The CD19 binding molecule of embodiment 31, wherein ABM2 comprises the CDR sequences of CD3-110.

[1280] 142. The CD19 binding molecule of embodiment 31, wherein ABM2 comprises the CDR sequences of CD3-111.

[1281] 143. The CD19 binding molecule of embodiment 31, wherein ABM2 comprises the CDR sequences of CD3-112.

[1282] 144. The CD19 binding molecule of embodiment 31, wherein ABM2 comprises the CDR sequences of CD3-113.

[1283] 145. The CD19 binding molecule of embodiment 31, wherein ABM2 comprises the CDR sequences of CD3-114.

[1284] 146. The CD19 binding molecule of embodiment 31, wherein ABM2 comprises the CDR sequences of CD3-115.

[1285] 147. The CD19 binding molecule of embodiment 31, wherein ABM2 comprises the CDR sequences of CD3-116.

[1286] 148. The CD19 binding molecule of embodiment 31, wherein ABM2 comprises the CDR sequences of CD3-117.

[1287] 149. The CD19 binding molecule of embodiment 31, wherein ABM2 comprises the CDR sequences of CD3-118.

[1288] 150. The CD19 binding molecule of embodiment 31, wherein ABM2 comprises the CDR sequences of CD3-119.

[1289] 151. The CD19 binding molecule of embodiment 31, wherein ABM2 comprises the CDR sequences of CD3-120.

[1290] 152. The CD19 binding molecule of embodiment 31, wherein ABM2 comprises the CDR sequences of CD3-121.

[1291] 153. The CD19 binding molecule of embodiment 31, wherein ABM2 comprises the CDR sequences of CD3-122.

[1292] 154. The CD19 binding molecule of embodiment 31, wherein ABM2 comprises the CDR sequences of CD3-123.

[1293] 155. The CD19 binding molecule of embodiment 31, wherein ABM2 comprises the CDR sequences of CD3-124.

[1294] 156. The CD19 binding molecule of embodiment 31, wherein ABM2 comprises the CDR sequences of CD3-125.

[1295] 157. The CD19 binding molecule of embodiment 31, wherein ABM2 comprises the CDR sequences of CD3-126.

[1296] 158. The CD19 binding molecule of embodiment 31, wherein ABM2 comprises the CDR sequences of CD3-127.

[1297] 159. The CD19 binding molecule of embodiment 31, wherein ABM2 comprises the CDR sequences of CD3-128.

[1298] 160. The CD19 binding molecule of embodiment 31, wherein ABM2 comprises the CDR sequences of CD3-129.

[1299] 161. The CD19 binding molecule of embodiment 31, wherein ABM2 comprises the CDR sequences of CD3-130.

[1300] 162. The CD19 binding molecule of any one of embodiments 32 to 161, wherein the CDRs are defined by Kabat numbering, as set forth in Table 12B.

[1301] 163. The CD19 binding molecule of any one of embodiments 32 to 161, wherein the CDRs are defined by Chothia numbering, as set forth in Table 12C.

[1302] 164. MBM of any one of embodiments 32 to 161, wherein the CDRs are defined by a combination of Kabat and Chothia numbering, as set forth in Table 12D.

[1303] 165. The CD19 binding molecule of embodiment 31, wherein ABM2 comprises the heavy and light chain variable sequences of CD3-1, as set forth in Table 12A.

[1304] 166. The of embodiment 31, wherein ABM2 comprises the heavy and light chain variable sequences of CD3-2, as set forth in Table 12A.

[1305] 167. The CD19 binding molecule of embodiment 31, wherein ABM2 comprises the heavy and light chain variable sequences of CD3-3, as set forth in Table 12A.

[1306] 168. The CD19 binding molecule of embodiment 31, wherein ABM2 comprises the heavy and light chain variable sequences of CD3-4, as set forth in Table 12A.

[1307] 169. The CD19 binding molecule of embodiment 31, wherein ABM2 comprises the heavy and light chain variable sequences of CD3-5, as set forth in Table 12A.

[1308] 170. The CD19 binding molecule of embodiment 31, wherein ABM2 comprises the heavy and light chain variable sequences of CD3-6, as set forth in Table 12A.

[1309] 171. The CD19 binding molecule of embodiment 31, wherein ABM2 comprises the heavy and light chain variable sequences of CD3-7, as set forth in Table 12A.

[1310] 172. The CD19 binding molecule of embodiment 31, wherein ABM2 comprises the heavy and light chain variable sequences of CD3-8, as set forth in Table 12A.

[1311] 173. The CD19 binding molecule of embodiment 31, wherein ABM2 comprises the heavy and light chain variable sequences of CD3-9, as set forth in Table 12A.

[1312] 174. The CD19 binding molecule of embodiment 31, wherein ABM2 comprises the heavy and light chain variable sequences of CD3-10, as set forth in Table 12A.

[1313] 175. The CD19 binding molecule of embodiment 31, wherein ABM2 comprises the heavy and light chain variable sequences of CD3-11, as set forth in Table 12A.

[1314] 176. The CD19 binding molecule of embodiment 31, wherein ABM2 comprises the heavy and light chain variable sequences of CD3-12, as set forth in Table 12A.

[1315] 177. The CD19 binding molecule of embodiment 31, wherein ABM2 comprises the heavy and light chain variable sequences of CD3-13, as set forth in Table 12A.

[1316] 178. The CD19 binding molecule of embodiment 31, wherein ABM2 comprises the heavy and light chain variable sequences of CD3-14, as set forth in Table 12A.

[1317] 179. The CD19 binding molecule of embodiment 31, wherein ABM2 comprises the heavy and light chain variable sequences of CD3-15, as set forth in Table 12A.

[1318] 180. The CD19 binding molecule of embodiment 31, wherein ABM2 comprises the heavy and light chain variable sequences of CD3-16, as set forth in Table 12A.

[1319] 181. The CD19 binding molecule of embodiment 31, wherein ABM2 comprises the heavy and light chain variable sequences of CD3-17, as set forth in Table 12A.

[1320] 182. The CD19 binding molecule of embodiment 31, wherein ABM2 comprises the heavy and light chain variable sequences of CD3-18, as set forth in Table 12A.

[1321] 183. The CD19 binding molecule of embodiment 31, wherein ABM2 comprises the heavy and light chain variable sequences of CD3-19, as set forth in Table 12A.

[1322] 184. The CD19 binding molecule of embodiment 31, wherein ABM2 comprises the heavy and light chain variable sequences of CD3-20, as set forth in Table 12A.

[1323] 185. The CD19 binding molecule of embodiment 31, wherein ABM2 comprises the heavy and light chain variable sequences of CD3-21, as set forth in Table 12A.

[1324] 186. The CD19 binding molecule of embodiment 31, wherein ABM2 comprises the heavy and light chain variable sequences of CD3-22, as set forth in Table 12A.

[1325] 187. The CD19 binding molecule of embodiment 31, wherein ABM2 comprises the heavy and light chain variable sequences of CD3-23, as set forth in Table 12A.

[1326] 188. The CD19 binding molecule of embodiment 31, wherein ABM2 comprises the heavy and light chain variable sequences of CD3-24, as set forth in Table 12A.

[1327] 189. The CD19 binding molecule of embodiment 31, wherein ABM2 comprises the heavy and light chain variable sequences of CD3-25, as set forth in Table 12A.

[1328] 190. The CD19 binding molecule of embodiment 31, wherein ABM2 comprises the heavy and light chain variable sequences of CD3-26, as set forth in Table 12A.

[1329] 191. The CD19 binding molecule of embodiment 31, wherein ABM2 comprises the heavy and light chain variable sequences of CD3-27, as set forth in Table 12A.

[1330] 192. The CD19 binding molecule of embodiment 31, wherein ABM2 comprises the heavy and light chain variable sequences of CD3-28, as set forth in Table 12A.

[1331] 193. The CD19 binding molecule of embodiment 31, wherein ABM2 comprises the heavy and light chain variable sequences of CD3-129, as set forth in Table 12A.

[1332] 194. The CD19 binding molecule of embodiment 31, wherein ABM2 comprises the heavy and light chain variable sequences of CD3-130, as set forth in Table 12A.

[1333] 195. The CD19 binding molecule of embodiment 31, wherein ABM2 comprises the amino acid sequence of the scFv designated as CD3-12 in Table 12A.

[1334] 196. The CD19 binding molecule of embodiment 31, wherein ABM2 comprises the amino acid sequence of the scFv designated as CD3-21 in Table 12A.

[1335] 197. The CD19 binding molecule of embodiment 31, wherein ABM2 comprises the amino acid sequence of the scFv designated as CD3-22 in Table 12A.

[1336] 198. The CD19 binding molecule of embodiment 31, wherein ABM2 comprises the amino acid sequence of the scFv designated as CD3-23 in Table 12A.

[1337] 199. The CD19 binding molecule of embodiment 31, wherein ABM2 comprises the amino acid sequence of the scFv designated as CD3-24 in Table 12A.

[1338] 200. The CD19 binding molecule of embodiment 31, wherein ABM2 comprises the amino acid sequence of the scFv designated as CD3-25 in Table 12A.

[1339] 201. The CD19 binding molecule of embodiment 31, wherein ABM2 comprises the amino acid sequence of the scFv designated as CD3-26 in Table 12A.

[1340] 202. The CD19 binding molecule of embodiment 31, wherein ABM2 comprises the amino acid sequence of the scFv designated as CD3-27 in Table 12A.

[1341] 203. The CD19 binding molecule of embodiment 31, wherein ABM2 comprises the amino acid sequence of the scFv designated as CD3-28 in Table 12A.

[1342] 204. The CD19 binding molecule of embodiment 31, wherein ABM2 comprises the amino acid sequence of the scFv designated as CD3-129 in Table 12A.

[1343] 205. The CD19 binding molecule of embodiment 31, wherein ABM2 comprises the amino acid sequence of the scFv designated as CD3-130 in Table 12A.

[1344] 206. The CD19 binding molecule of embodiment 30, wherein the component of the TCR complex is TCR-a, TCR-s, or a TCR-a/s dimer.

[1345] 207. The CD19 binding molecule of embodiment 206, wherein the component of the TCR complex is TCR-a.

[1346] 208. The CD19 binding molecule of embodiment 206, wherein the component of the TCR complex is TCR-s.

[1347] 209. The CD19 binding molecule of embodiment 206, wherein the component of the TCR complex is a TCR-a/s dimer.

[1348] 210. The CD19 binding molecule of embodiment 206, wherein ABM2 comprises the CDR sequences of BMA031.

[1349] 211. The CD19 binding molecule of embodiment 210, wherein the CDR sequences are defined by Kabat numbering.

[1350] 212. The CD19 binding molecule of embodiment 210, wherein the CDR sequences are defined by Chothia numbering.

[1351] 213. The CD19 binding molecule of embodiment 210, wherein the CDR sequences are defined by a combination of Kabat and Chothia numbering.

[1352] 214. The CD19 binding molecule of embodiment 210, wherein ABM2 comprises the heavy and light chain variable sequences of BMA031.

[1353] 215. The CD19 binding molecule of embodiment 30, wherein the component of the TCR complex is TCR-γ, TCR-δ, or a TCR-γ/δ dimer.

[1354] 216. The CD19 binding molecule of embodiment 215, wherein the component of the TCR complex is TCR-γ.

[1355] 217. The CD19 binding molecule of embodiment 215, wherein the component of the TCR complex is TCR-δ.

[1356] 218. The CD19 binding molecule of embodiment 215, wherein the component of the TCR complex is a TCR-γ/δ dimer.

[1357] 219. The CD19 binding molecule of embodiment 215, wherein ABM2 comprises the CDR sequences of 6TCS1.

[1358] 220. The CD19 binding molecule of embodiment 219, wherein the CDR sequences are defined by Kabat numbering.

[1359] 221. The CD19 binding molecule of embodiment 219, wherein the CDR sequences are defined by Chothia numbering.

[1360] 222. The CD19 binding molecule of embodiment 219, wherein the CDR sequences are defined by a combination of Kabat and Chothia numbering.

[1361] 223. The CD19 binding molecule of embodiment 219, wherein ABM2 comprises the heavy and light chain variable sequences of 6TCS1.

[1362] 224. The CD19 binding molecule of any one of embodiments 16 to 223, in which ABM1 is capable of binding CD19 at the same time as ABM2 is bound to its target molecule.

[1363] 225. The CD19 binding molecule of any one of embodiments 16 to 224, which is a bispecific binding molecule (BBM).

[1364] 226. The CD19 binding molecule of embodiment 225, which is bivalent.

[1365] 227. The CD19 binding molecule of embodiment 226, wherein the CD19 binding molecule has any one of the configurations depicted in FIGS. 1B-1F.

[1366] 228. The CD19 binding molecule of embodiment 227, wherein the CD19 binding molecule has the configuration depicted in FIG. 1B.

[1367] 229. The CD19 binding molecule of embodiment 227, wherein the CD19 binding molecule has the configuration depicted in FIG. 1C.

[1368] 230. The CD19 binding molecule of embodiment 227, wherein the CD19 binding molecule has the configuration depicted in FIG. 1D.

[1369] 231. The CD19 binding molecule of embodiment 227, wherein the CD19 binding molecule has the configuration depicted in FIG. 1E.

[1370] 232. The CD19 binding molecule of embodiment 227, wherein the CD19 binding molecule has the configuration depicted in FIG. 1F.

[1371] 233. The CD19 binding molecule of any one of embodiments 227 to 232, which has the configuration referred to as B1 in Section 7.5.1.

[1372] 234. The CD19 binding molecule of any one of embodiments 227 to 232, which has the configuration referred to as B2 in Section 7.5.1.

[1373] 235. The CD19 binding molecule of embodiment 225, which is trivalent.

[1374] 236. The CD19 binding molecule of embodiment 235, wherein the CD19 binding molecule has any one of the configurations depicted in FIGS. 1G-1Z.

[1375] 237. The CD19 binding molecule of embodiment 236, wherein the CD19 binding molecule has the configuration depicted in FIG. 1G.

[1376] 238. The CD19 binding molecule of embodiment 236, wherein the CD19 binding molecule has the configuration depicted in FIG. 1H.

[1377] 239. The CD19 binding molecule of embodiment 236, wherein the CD19 binding molecule has the configuration depicted in FIG. 1I.

[1378] 240. The CD19 binding molecule of embodiment 236, wherein the CD19 binding molecule has the configuration depicted in FIG. 1J.

[1379] 241. The CD19 binding molecule of embodiment 236, wherein the CD19 binding molecule has the configuration depicted in FIG. 1K.

[1380] 242. The CD19 binding molecule of embodiment 236, wherein the CD19 binding molecule has the configuration depicted in FIG. 1L.

[1381] 243. The CD19 binding molecule of embodiment 236, wherein the CD19 binding molecule has the configuration depicted in FIG. 1M.

[1382] 244. The CD19 binding molecule of embodiment 236, wherein the CD19 binding molecule has the configuration depicted in FIG. 1N.

[1383] 245. The CD19 binding molecule of embodiment 236, wherein the CD19 binding molecule has the configuration depicted in FIG. 1O.

[1384] 246. The CD19 binding molecule of embodiment 236, wherein the CD19 binding molecule has the configuration depicted in FIG. 1P.

[1385] 247. The CD19 binding molecule of embodiment 236, wherein the CD19 binding molecule has the configuration depicted in FIG. 1Q.

[1386] 248. The CD19 binding molecule of embodiment 236, wherein the CD19 binding molecule has the configuration depicted in FIG. 1R.

[1387] 249. The CD19 binding molecule of embodiment 236, wherein the CD19 binding molecule has the configuration depicted in FIG. 1S.

[1388] 250. The CD19 binding molecule of embodiment 236, wherein the CD19 binding molecule has the configuration depicted in FIG. 1T.

[1389] 251. The CD19 binding molecule of embodiment 236, wherein the CD19 binding molecule has the configuration depicted in FIG. 1U.

[1390] 252. The CD19 binding molecule of embodiment 236, wherein the CD19 binding molecule has the configuration depicted in FIG. 1V.

[1391] 253. The CD19 binding molecule of embodiment 236, wherein the CD19 binding molecule has the configuration depicted in FIG. 1W.

[1392] 254. The CD19 binding molecule of embodiment 236, wherein the CD19 binding molecule has the configuration depicted in FIG. 1X.

[1393] 255. The CD19 binding molecule of embodiment 236, wherein the CD19 binding molecule has the configuration depicted in FIG. 1Y.

[1394] 256. The CD19 binding molecule of embodiment 236, wherein the CD19 binding molecule has the configuration depicted in FIG. 1Z.

[1395] 257. The CD19 binding molecule of any one of embodiments 235 to 256, which has the configuration referred to as T1 in Section 7.5.2.

[1396] 258. The CD19 binding molecule of any one of embodiments 235 to 256, which has the configuration referred to as T2 in Section 7.5.2.

[1397] 259. The CD19 binding molecule of any one of embodiments 235 to 256, which has the configuration referred to as T3 in Section 7.5.2.

[1398] 260. The CD19 binding molecule of any one of embodiments 235 to 256, which has the configuration referred to as T4 in Section 7.5.2.

[1399] 261. The CD19 binding molecule of any one of embodiments 235 to 256, which has the configuration referred to as T5 in Section 7.5.2.

[1400] 262. The CD19 binding molecule of any one of embodiments 235 to 256, which has the configuration referred to as T6 in Section 7.5.2.

[1401] 263. The CD19 binding molecule of embodiment 225, which is tetravalent.

[1402] 264. The CD19 binding molecule of embodiment 263, wherein the CD19 binding molecule has any one of the configurations depicted in FIGS. 1AA-1AH.

[1403] 265. The CD19 binding molecule of embodiment 264, wherein the CD19 binding molecule has the configuration depicted in FIG. 1AA.

[1404] 266. The CD19 binding molecule of embodiment 264, wherein the CD19 binding molecule has the configuration depicted in FIG. 1AB.

[1405] 267. The CD19 binding molecule of embodiment 264, wherein the CD19 binding molecule has the configuration depicted in FIG. 1AC.

[1406] 268. The CD19 binding molecule of embodiment 264, wherein the CD19 binding molecule has the configuration depicted in FIG. 1AD.

[1407] 269. The CD19 binding molecule of embodiment 264, wherein the CD19 binding molecule has the configuration depicted in FIG. 1AE.

[1408] 270. The CD19 binding molecule of embodiment 264, wherein the CD19 binding molecule has the configuration depicted in FIG. 1AF.

[1409] 271. The CD19 binding molecule of embodiment 264, wherein the CD19 binding molecule has the configuration depicted in FIG. 1AG.

[1410] 272. The CD19 binding molecule of embodiment 264, wherein the CD19 binding molecule has the configuration depicted in FIG. 1AH.

[1411] 273. The CD19 binding molecule of any one of embodiments 263 to 272, which has the configuration referred to as Tv1 in Section 7.5.3.

[1412] 274. The CD19 binding molecule of any one of embodiments 263 to 272, which has the configuration referred to as Tv2 in Section 7.5.3.

[1413] 275. The CD19 binding molecule of any one of embodiments 263 to 272, which has the configuration referred to as Tv3 in Section 7.5.3.

[1414] 276. The CD19 binding molecule of any one of embodiments 263 to 272, which has the configuration referred to as Tv4 in Section 7.5.3.

[1415] 277. The CD19 binding molecule of any one of embodiments 263 to 272, which has the configuration referred to as Tv5 in Section 7.5.3.

[1416] 278. The CD19 binding molecule of any one of embodiments 263 to 272, which has the configuration referred to as Tv6 in Section 7.5.3.

[1417] 279. The CD19 binding molecule of any one of embodiments 263 to 272, which has the configuration referred to as Tv7 in Section 7.5.3.

[1418] 280. The CD19 binding molecule of any one of embodiments 263 to 272, which has the configuration referred to as Tv8 in Section 7.5.3.

[1419] 281. The CD19 binding molecule of any one of embodiments 263 to 272, which has the configuration referred to as Tv9 in Section 7.5.3.

[1420] 282. The CD19 binding molecule of any one of embodiments 263 to 272, which has the configuration referred to as Tv10 in Section 7.5.3.

[1421] 283. The CD19 binding molecule of any one of embodiments 263 to 272, which has the configuration referred to as Tv1 in Section 7.5.3.

[1422] 284. The CD19 binding molecule of any one of embodiments 263 to 272, which has the configuration referred to as Tv12 in Section 7.5.3.

[1423] 285. The CD19 binding molecule of any one of embodiments 263 to 272, which has the configuration referred to as Tv13 in Section 7.5.3.

[1424] 286. The CD19 binding molecule of any one of embodiments 263 to 272, which has the configuration referred to as Tv14 in Section 7.5.3.

[1425] 287. The CD19 binding molecule of any one of embodiments 16 to 224, which is a trispecific binding molecule (TBM) comprising an antigen-binding module 3 (ABM3) that binds specifically to a target molecule other than CD19.

[1426] 288. The CD19 binding molecule of embodiment 287, in which ABM2 binds specifically to a component of a human T-cell receptor (TCR) complex and ABM3 binds specifically to (i) human CD2 or (ii) a tumor associated antigen (TAA).

[1427] 289. The CD19 binding molecule of embodiment 287 or embodiment 288, which is trivalent.

[1428] 290. The CD19 binding molecule of embodiment 289, wherein the CD19 binding molecule has any one of the configurations depicted in FIGS. 2A-2P.

[1429] 291. The CD19 binding molecule of embodiment 290, wherein the CD19 binding molecule has the configuration depicted in FIG. 2A.

[1430] 292. The CD19 binding molecule of embodiment 290, wherein the CD19 binding molecule has the configuration depicted in FIG. 2B.

[1431] 293. The CD19 binding molecule of embodiment 290, wherein the CD19 binding molecule has the configuration depicted in FIG. 2C.

[1432] 294. The CD19 binding molecule of embodiment 290, wherein the CD19 binding molecule has the configuration depicted in FIG. 2D.

[1433] 295. The CD19 binding molecule of embodiment 290, wherein the CD19 binding molecule has the configuration depicted in FIG. 2E.

[1434] 296. The CD19 binding molecule of embodiment 290, wherein the CD19 binding molecule has the configuration depicted in FIG. 2F.

[1435] 297. The CD19 binding molecule of embodiment 290, wherein the CD19 binding molecule has the configuration depicted in FIG. 2G.

[1436] 298. The CD19 binding molecule of embodiment 290, wherein the CD19 binding molecule has the configuration depicted in FIG. 2H.

[1437] 299. The CD19 binding molecule of embodiment 290, wherein the CD19 binding molecule has the configuration depicted in FIG. 2I.

[1438] 300. The CD19 binding molecule of embodiment 290, wherein the CD19 binding molecule has the configuration depicted in FIG. 2J.

[1439] 301. The CD19 binding molecule of embodiment 290, wherein the CD19 binding molecule has the configuration depicted in FIG. 2K.

[1440] 302. The CD19 binding molecule of embodiment 290, wherein the CD19 binding molecule has the configuration depicted in FIG. 2L.

[1441] 303. The CD19 binding molecule of embodiment 290, wherein the CD19 binding molecule has the configuration depicted in FIG. 2M.

[1442] 304. The CD19 binding molecule of embodiment 290, wherein the CD19 binding molecule has the configuration depicted in FIG. 2N.

[1443] 305. The CD19 binding molecule of embodiment 290, wherein the CD19 binding molecule has the configuration depicted in FIG. 2O.

[1444] 306. The CD19 binding molecule of embodiment 290, wherein the CD19 binding molecule has the configuration depicted in FIG. 2P.

[1445] 307. The CD19 binding molecule of any one of embodiments 290 to 306, which has the configuration referred to as T1 in Section 7.6.1.

[1446] 308. CD19 binding molecule of any one of embodiments 290 to 306, which has the configuration referred to as T2 in Section 7.6.1.

[1447] 309. CD19 binding molecule of any one of embodiments 290 to 306, which has the configuration referred to as T3 in Section 7.6.1.

[1448] 310. CD19 binding molecule of any one of embodiments 290 to 306, which has the configuration referred to as T4 in Section 7.6.1.

[1449] 311. CD19 binding molecule of any one of embodiments 290 to 306, which has the configuration referred to as T5 in Section 7.6.1.

[1450] 312. CD19 binding molecule of any one of embodiments 290 to 306, which has the configuration referred to as T6 in Section 7.6.1.

[1451] 313. The CD19 binding molecule of embodiment 287 or embodiment 288, which is tetravalent.

[1452] 314. The CD19 binding molecule of embodiment 313, wherein the CD19 binding molecule has any one of the configurations depicted in FIGS. 2Q-2S.

[1453] 315. The CD19 binding molecule of embodiment 314, wherein the CD19 binding molecule has the configuration depicted in FIG. 2Q.

[1454] 316. The CD19 binding molecule of embodiment 314, wherein the CD19 binding molecule has the configuration depicted in FIG. 2R.

[1455] 317. The CD19 binding molecule of embodiment 314, wherein the CD19 binding molecule has the configuration depicted in FIG. 2S.

[1456] 318. The CD19 binding molecule of embodiment 287 or embodiment 288, which is pentavalent.

[1457] 319. The CD19 binding molecule of embodiment 318, wherein the CD19 binding molecule has the configuration depicted in FIG. 2T.

[1458] 320. The CD19 binding molecule of embodiment 287 or embodiment 288, which is hexavalent.

[1459] 321. The CD19 binding molecule of embodiment 320, wherein the CD19 binding molecule has any one of the configurations depicted in FIGS. 2U-2V.

[1460] 322. The CD19 binding molecule of embodiment 321, wherein the CD19 binding molecule has the configuration depicted in FIG. 2U.

[1461] 323. The CD19 binding molecule of embodiment 321, wherein the CD19 binding molecule has the configuration depicted in FIG. 2V.

[1462] 324. The CD19 binding molecule of any one of embodiments 287 to 323, in which ABM1 is capable of binding CD19 at the same time ABM3 is bound to its target molecule.

[1463] 325. The CD19 binding molecule of any one of embodiments 287 to 324, in which ABM3 binds specifically to human CD2.

[1464] 326. The CD19 binding molecule of embodiment 325, wherein ABM3 is a non-immunoglobulin scaffold based ABM.

[1465] 327. The CD19 binding molecule of embodiment 326, wherein ABM3 is a Kunitz domain, an Adnexin, an Affibody, a DARPin, an Avimer, an Anticalin, a Lipocalin, a Centyrin, a Versabody, a Knottin, an Adnectin, a Pronectin, an Affitin/Nanofitin, an Affilin, an Atrimer/Tetranectin, a bicyclic peptide, a cys-knot, a Fn3 scaffold, an Obody, a Tn3, an Affimer, BD, an Adhiron, a Duocalin, an Alphabody, an Armadillo Repeat Protein, a Repebody, or a Fynomer.

[1466] 328. The CD19 binding molecule of embodiment 326, wherein ABM3 comprises a receptor binding domain of a CD2 ligand.

[1467] 329. The CD19-binding molecule of embodiment 325, wherein ABM3 is a CD58 moiety.

[1468] 330. The CD19-binding molecule of embodiment 329, wherein the CD58 moiety comprises the amino acid sequence of CD58-1 as set forth in Table 15.

[1469] 331. The CD19-binding molecule of embodiment 329, wherein the CD58 moiety comprises the amino acid sequence of CD58-2 as set forth in Table 15.

[1470] 332. The CD19-binding molecule of embodiment 329, wherein the CD58 moiety comprises the amino acid sequence of CD58-3 as set forth in Table 15.

[1471] 333. The CD19-binding molecule of embodiment 329, wherein the CD58 moiety comprises the amino acid sequence of CD58-4 as set forth in Table 15.

[1472] 334. The CD19-binding molecule of embodiment 329, wherein the CD58 moiety comprises the amino acid sequence of CD58-5 as set forth in Table 15.

[1473] 335. The CD19-binding molecule of embodiment 334, wherein the amino acid designated as B is a phenylalanine.

[1474] 336. The CD19-binding molecule of embodiment 334, wherein the amino acid designated as B is a serine.

[1475] 337. The CD19-binding molecule of any one of embodiments 334 to 336, wherein the amino acid designated as J is a valine.

[1476] 338. The CD19-binding molecule of any one of embodiments 334 to 336, wherein the amino acid designated as J is a lysine.

[1477] 339. The CD19-binding molecule of any one of embodiments 334 to 338, wherein the amino acid designated as O is a valine.

[1478] 340. The CD19-binding molecule of any one of embodiments 334 to 338, wherein the amino acid designated as O is a glutamine.

[1479] 341. The CD19-binding molecule of any one of embodiments 334 to 340, wherein the amino acid designated as U is a valine.

[1480] 342. The CD19-binding molecule of any one of embodiments 334 to 340, wherein the amino acid designated as U is a lysine.

[1481] 343. The CD19-binding molecule of any one of embodiments 334 to 342, wherein the amino acid designated as X is a threonine.

[1482] 344. The CD19-binding molecule of any one of embodiments 334 to 342, wherein the amino acid designated as X is a serine.

[1483] 345. The CD19-binding molecule of any one of embodiments 334 to 344, wherein the amino acid designated as Z is a leucine.

[1484] 346. The CD19-binding molecule of any one of embodiments 334 to 344, wherein the amino acid designated as Z is a glycine.

[1485] 347. The CD19-binding molecule of embodiment 329, wherein the CD58 moiety comprises the amino acid sequence of CD58-6 as set forth in Table 15.

[1486] 348. The CD19-binding molecule of embodiment 329, wherein the CD58 moiety comprises the amino acid sequence of CD58-7 as set forth in Table 15.

[1487] 349. The CD19-binding molecule of embodiment 348, wherein the amino acid designated as J is a valine.

[1488] 350. The CD19-binding molecule of embodiment 348, wherein the amino acid designated as J is a lysine.

[1489] 351. The CD19-binding molecule of any one of embodiments 348 to 350, wherein the amino acid designated as O is a valine.

[1490] 352. The CD19-binding molecule of any one of embodiments 348 to 350, wherein the amino acid designated as O is a glutamine.

[1491] 353. The CD19-binding molecule of embodiment 329, wherein the CD58 moiety comprises the amino acid sequence of CD58-8 as set forth in Table 15.

[1492] 354. The CD19-binding molecule of embodiment 329, wherein the CD58 moiety comprises the amino acid sequence of CD58-9 as set forth in Table 15.

[1493] 355. The CD19-binding molecule of embodiment 329, wherein the CD58 moiety comprises the amino acid sequence of CD58-10 as set forth in Table 15.

[1494] 356. The CD19-binding molecule of embodiment 329, wherein the CD58 moiety comprises the amino acid sequence of CD58-11 as set forth in Table 15.

[1495] 357. The CD19-binding molecule of embodiment 325, wherein ABM3 is a CD48 moiety.

[1496] 358. The CD19 binding molecule of embodiment 357, wherein the CD48 moiety has at least 70% sequence identity to amino acids 27-220 of the amino acid sequence of Uniprot identifier P09326.

[1497] 359. The CD19 binding molecule of embodiment 357, wherein the CD48 moiety has at least 80% sequence identity to amino acids 27-220 of the amino acid sequence of Uniprot identifier P09326.

[1498] 360. The CD19 binding molecule of embodiment 357, wherein the CD48 moiety has at least 90% sequence identity to amino acids 27-220 of the amino acid sequence of Uniprot identifier P09326.

[1499] 361. The CD19 binding molecule of embodiment 357, wherein the CD48 moiety has at least 95% sequence identity to amino acids 27-220 of the amino acid sequence of Uniprot identifier P09326.

[1500] 362. The CD19 binding molecule of embodiment 357, wherein the CD48 moiety has at least 99% sequence identity to amino acids 27-220 of the amino acid sequence of Uniprot identifier P09326.

[1501] 363. The CD19 binding molecule of embodiment 325, wherein ABM3 is an immunoglobulin scaffold based ABM.

[1502] 364. The CD19 binding molecule of embodiment 363, wherein ABM3 is an antibody, an antibody fragment, an scFv, a dsFv, a Fv, a Fab, an scFab, a (Fab′)2, a single domain antibody (SDAB), a VH or VL domain, or a camelid VHH domain.

[1503] 365. The CD19-binding molecule of embodiment 363, wherein ABM3 is an anti-CD2 antibody or an antigen-binding domain thereof.

[1504] 366. The CD19 binding molecule of embodiment 364, wherein ABM3 is an scFv.

[1505] 367. The CD19 binding molecule of embodiment 364, wherein ABM3 is a Fab.

[1506] 368. The CD19 binding molecule of embodiment 367, wherein ABM3 is a Fab heterodimer.

[1507] 369. The CD19 binding molecule of any one of embodiments 363 to 368, wherein ABM3 comprises the CDR sequences of CD2-1.

[1508] 370. The CD19 binding molecule of embodiment 369, wherein ABM3 comprises the heavy and light chain variable sequences of CD2-1.

[1509] 371. The CD19 binding molecule of embodiment 369, wherein ABM3 comprises the heavy and light chain variable sequences of hu1CD2-1.

[1510] 372. The CD19 binding molecule of embodiment 369, wherein ABM3 comprises the heavy and light chain variable sequences of hu2CD2-1.

[1511] 373. The CD19 binding molecule of embodiment 369, wherein ABM3 comprises the CDR sequences of Medi 507.

[1512] 374. The CD19 binding molecule of embodiment 373, wherein ABM3 comprises the heavy and light chain variable sequences of Medi 507.

[1513] 375. The CD19 binding molecule of any one of embodiments 287 to 324, in which ABM3 binds specifically to a human TAA.

[1514] 376. The CD19 binding molecule of embodiment 375, wherein ABM3 is a non-immunoglobulin scaffold based ABM.

[1515] 377. The CD19 binding molecule of embodiment 376, wherein if TAA is a receptor, ABM3 comprises a receptor binding domain of a ligand of the receptor, and if TAA is a ligand, ABM3 comprises a ligand binding domain of a receptor of the ligand.

[1516] 378. The CD19 binding molecule of embodiment 376, wherein ABM3 is a Kunitz domain, an Adnexin, an Affibody, a DARPin, an Avimer, an Anticalin, a Lipocalin, a Centyrin, a Versabody, a Knottin, an Adnectin, a Pronectin, an Affitin/Nanofitin, an Affilin, an Atrimer/Tetranectin, a bicyclic peptide, a cys-knot, a Fn3 scaffold, an Obody, a Tn3, an Affimer, BD, an Adhiron, a Duocalin, an Alphabody, an Armadillo Repeat Protein, a Repebody, or a Fynomer.

[1517] 379. The CD19 binding molecule of embodiment 375, wherein ABM3 is an immunoglobulin scaffold based ABM.

[1518] 380. The CD19 binding molecule of embodiment 379, wherein ABM3 is an antibody, an antibody fragment, an scFv, a dsFv, a Fv, a Fab, an scFab, a (Fab′)2, a single domain antibody (SDAB), a VH or VL domain, or a camelid VHH domain.

[1519] 381. The CD19 binding molecule of embodiment 380, wherein ABM3 is an antibody or an antigen-binding domain thereof.

[1520] 382. The CD19 binding molecule of embodiment 380, wherein ABM3 is an scFv.

[1521] 383. The CD19 binding molecule of embodiment 380, wherein ABM3 is a Fab.

[1522] 384. The CD19 binding molecule of embodiment 383, wherein ABM3 is a Fab heterodimer.

[1523] 385. The CD19 binding molecule of any one of embodiments 375 to 384, wherein the TAA is a TAA expressed on cancerous B cells that are B cell-derived plasma cells.

[1524] 386. The CD19 binding molecule of any one of embodiments 375 to 385, wherein the TAA is a TAA expressed on cancerous B cells that are not plasma cells.

[1525] 387. The CD19 binding molecule of any one of embodiments 375 to 386, wherein the TAA is selected from BCMA, CD20, CD22, CD123, CD33, CLL1, CD138, CS1, CD38, CD133, FLT3, CD52, TNFRSF13C, TNFRSF13B, CXCR4, PD-L1, LY9, CD200, FCGR2B, CD21, CD23, CD24, CD40L, CD72, CD79a, and CD79b.

[1526] 388. The CD19 binding molecule of embodiment 387, wherein the TAA is BCMA.

[1527] 389. The CD19 binding molecule of embodiment 387, wherein the TAA is CD20.

[1528] 390. The CD19 binding molecule of embodiment 387, wherein the TAA is CD22.

[1529] 391. The CD19 binding molecule of embodiment 387, wherein the TAA is CD123.

[1530] 392. The CD19 binding molecule of embodiment 387, wherein the TAA is CD33.

[1531] 393. The CD19 binding molecule of embodiment 387, wherein the TAA is CLL1.

[1532] 394. The CD19 binding molecule of embodiment 387, wherein the TAA is CD138.

[1533] 395. The CD19 binding molecule of embodiment 387, wherein the TAA is CS1.

[1534] 396. The CD19 binding molecule of embodiment 387, wherein the TAA is CD38.

[1535] 397. The CD19 binding molecule of embodiment 387, wherein the TAA is CD133.

[1536] 398. The CD19 binding molecule of embodiment 387, wherein the TAA is FLT3.

[1537] 399. The CD19 binding molecule of embodiment 387, wherein the TAA is CD52.

[1538] 400. The CD19 binding molecule of embodiment 387, wherein the TAA is TNFRSF13C.

[1539] 401. The CD19 binding molecule of embodiment 387, wherein the TAA is TNFRSF13B.

[1540] 402. The CD19 binding molecule of embodiment 387, wherein the TAA is CXCR4.

[1541] 403. The CD19 binding molecule of embodiment 387, wherein the TAA is PD-1.

[1542] 404. The CD19 binding molecule of embodiment 387, wherein the TAA is LY9.

[1543] 405. The CD19 binding molecule of embodiment 387, wherein the TAA is CD200.

[1544] 406. The CD19 binding molecule of embodiment 387, wherein the TAA is FCGR2B.

[1545] 407. The CD19 binding molecule of embodiment 387, wherein the TAA is CD21.

[1546] 408. The CD19 binding molecule of embodiment 387, wherein the TAA is CD23.

[1547] 409. The CD19 binding molecule of embodiment 387, wherein ABM3 comprises a binding sequence set forth in Table 16 or Table 17.

[1548] 410. The CD19 binding molecule of embodiment 409, which has the heavy and/or light chain variable regions of any one of BCMA-1 to BCMA-40 as set forth in Table 17A.

[1549] 411. The CD19 binding molecule of embodiment 410, wherein ABM3 comprises the heavy and light chain variable sequences of BCMA-1, as set forth in Table 17A.

[1550] 412. The CD19 binding molecule of embodiment 410, wherein ABM3 comprises the heavy and light chain variable sequences of BCMA-2, as set forth in Table 17A.

[1551] 413. The CD19 binding molecule of embodiment 410, wherein ABM3 comprises the heavy and light chain variable sequences of BCMA-3, as set forth in Table 17A.

[1552] 414. The CD19 binding molecule of embodiment 410, wherein ABM3 comprises the heavy and light chain variable sequences of BCMA-4, as set forth in Table 17A.

[1553] 415. The CD19 binding molecule of embodiment 410, wherein ABM3 comprises the heavy and light chain variable sequences of BCMA-5, as set forth in Table 17A.

[1554] 416. The CD19 binding molecule of embodiment 410, wherein ABM3 comprises the heavy and light chain variable sequences of BCMA-6, as set forth in Table 17A.

[1555] 417. The CD19 binding molecule of embodiment 410, wherein ABM3 comprises the heavy and light chain variable sequences of BCMA-7, as set forth in Table 17A.

[1556] 418. The CD19 binding molecule of embodiment 410, wherein ABM3 comprises the heavy and light chain variable sequences of BCMA-8, as set forth in Table 17A.

[1557] 419. The CD19 binding molecule of embodiment 410, wherein ABM3 comprises the heavy and light chain variable sequences of BCMA-9, as set forth in Table 17A.

[1558] 420. The CD19 binding molecule of embodiment 410, wherein ABM3 comprises the heavy and light chain variable sequences of BCMA-10, as set forth in Table 17A.

[1559] 421. The CD19 binding molecule of embodiment 410, wherein ABM3 comprises the heavy and light chain variable sequences of BCMA-11, as set forth in Table 17A.

[1560] 422. The CD19 binding molecule of embodiment 410, wherein ABM3 comprises the heavy and light chain variable sequences of BCMA-12, as set forth in Table 17A.

[1561] 423. The CD19 binding molecule of embodiment 410, wherein ABM3 comprises the heavy and light chain variable sequences of BCMA-13, as set forth in Table 17A.

[1562] 424. The CD19 binding molecule of embodiment 410, wherein ABM3 comprises the heavy and light chain variable sequences of BCMA-14, as set forth in Table 17A.

[1563] 425. The CD19 binding molecule of embodiment 410, wherein ABM3 comprises the heavy and light chain variable sequences of BCMA-15, as set forth in Table 17A.

[1564] 426. The CD19 binding molecule of embodiment 410, wherein ABM3 comprises the heavy and light chain variable sequences of BCMA-16, as set forth in Table 17A.

[1565] 427. The CD19 binding molecule of embodiment 410, wherein ABM3 comprises the heavy and light chain variable sequences of BCMA-17, as set forth in Table 17A.

[1566] 428. The CD19 binding molecule of embodiment 410, wherein ABM3 comprises the heavy and light chain variable sequences of BCMA-18, as set forth in Table 17A.

[1567] 429. The CD19 binding molecule of embodiment 410, wherein ABM3 comprises the heavy and light chain variable sequences of BCMA-19, as set forth in Table 17A.

[1568] 430. The CD19 binding molecule of embodiment 410, wherein ABM3 comprises the heavy and light chain variable sequences of BCMA-20, as set forth in Table 17A.

[1569] 431. The CD19 binding molecule of embodiment 410, wherein ABM3 comprises the heavy and light chain variable sequences of BCMA-21, as set forth in Table 17A.

[1570] 432. The CD19 binding molecule of embodiment 410, wherein ABM3 comprises the heavy and light chain variable sequences of BCMA-22, as set forth in Table 17A.

[1571] 433. The CD19 binding molecule of embodiment 410, wherein ABM3 comprises the heavy and light chain variable sequences of BCMA-23, as set forth in Table 17A.

[1572] 434. The CD19 binding molecule of embodiment 410, wherein ABM3 comprises the heavy and light chain variable sequences of BCMA-24, as set forth in Table 17A.

[1573] 435. The CD19 binding molecule of embodiment 410, wherein ABM3 comprises the heavy and light chain variable sequences of BCMA-25, as set forth in Table 17A.

[1574] 436. The CD19 binding molecule of embodiment 410, wherein ABM3 comprises the heavy and light chain variable sequences of BCMA-26, as set forth in Table 17A.

[1575] 437. The CD19 binding molecule of embodiment 410, wherein ABM3 comprises the heavy and light chain variable sequences of BCMA-27, as set forth in Table 17A.

[1576] 438. The CD19 binding molecule of embodiment 410, wherein ABM3 comprises the heavy and light chain variable sequences of BCMA-28, as set forth in Table 17A.

[1577] 439. The CD19 binding molecule of embodiment 410, wherein ABM3 comprises the heavy and light chain variable sequences of BCMA-29, as set forth in Table 17A.

[1578] 440. The CD19 binding molecule of embodiment 410, wherein ABM3 comprises the heavy and light chain variable sequences of BCMA-30, as set forth in Table 17A.

[1579] 441. The CD19 binding molecule of embodiment 410, wherein ABM3 comprises the heavy and light chain variable sequences of BCMA-31, as set forth in Table 17A.

[1580] 442. The CD19 binding molecule of embodiment 410, wherein ABM3 comprises the heavy and light chain variable sequences of BCMA-32, as set forth in Table 17A.

[1581] 443. The CD19 binding molecule of embodiment 410, wherein ABM3 comprises the heavy and light chain variable sequences of BCMA-33, as set forth in Table 17A.

[1582] 444. The CD19 binding molecule of embodiment 410, wherein ABM3 comprises the heavy and light chain variable sequences of BCMA-34, as set forth in Table 17A.

[1583] 445. The CD19 binding molecule of embodiment 410, wherein ABM3 comprises the heavy and light chain variable sequences of BCMA-35, as set forth in Table 17A.

[1584] 446. The CD19 binding molecule of embodiment 410, wherein ABM3 comprises the heavy and light chain variable sequences of BCMA-36, as set forth in Table 17A.

[1585] 447. The CD19 binding molecule of embodiment 410, wherein ABM3 comprises the heavy and light chain variable sequences of BCMA-37, as set forth in Table 17A.

[1586] 448. The CD19 binding molecule of embodiment 410, wherein ABM3 comprises the heavy and light chain variable sequences of BCMA-38, as set forth in Table 17A.

[1587] 449. The CD19 binding molecule of embodiment 410, wherein ABM3 comprises the heavy and light chain variable sequences of BCMA-39, as set forth in Table 17A.

[1588] 450. The CD19 binding molecule of embodiment 410, wherein ABM3 comprises the heavy and light chain variable sequences of BCMA-40, as set forth in Table 17A.

[1589] 451. The CD19 binding molecule of embodiment 409, which has the heavy and/or light chain CDR sequences (as defined by Kabat) of any one of BCMA-1 to BCMA-40 as set forth in Tables 17B and 17E.

[1590] 452. The CD19 binding molecule of embodiment 409, which has the heavy and/or light chain CDR sequences (as defined by Chothia) of any one of BCMA-1 to BCMA-40 as set forth in Tables 17C and 17F.

[1591] 453. The CD19 binding molecule of embodiment 409, which has the heavy and/or light chain CDR sequences (as defined by a combination of Kabat and Chothia sequences) of any one of BCMA-1 to BCMA-40 as set forth in Tables 17D and 17G.

[1592] 454. The CD19 binding molecule of any one of embodiments 451 to 453, wherein ABM3 comprises the CDR sequences of BCMA-1.

[1593] 455. The CD19 binding molecule of any one of embodiments 451 to 453, wherein ABM3 comprises the CDR sequences of BCMA-2.

[1594] 456. The CD19 binding molecule of any one of embodiments 451 to 453, wherein ABM3 comprises the CDR sequences of BCMA-3.

[1595] 457. The CD19 binding molecule of any one of embodiments 451 to 453, wherein ABM3 comprises the CDR sequences of BCMA-4.

[1596] 458. The CD19 binding molecule of any one of embodiments 451 to 453, wherein ABM3 comprises the CDR sequences of BCMA-5.

[1597] 459. The CD19 binding molecule of any one of embodiments 451 to 453, wherein ABM3 comprises the CDR sequences of BCMA-6.

[1598] 460. The CD19 binding molecule of any one of embodiments 451 to 453, wherein ABM3 comprises the CDR sequences of BCMA-7.

[1599] 461. The CD19 binding molecule of any one of embodiments 451 to 453, wherein ABM3 comprises the CDR sequences of BCMA-8.

[1600] 462. The CD19 binding molecule of any one of embodiments 451 to 453, wherein ABM3 comprises the CDR sequences of BCMA-9.

[1601] 463. The CD19 binding molecule of any one of embodiments 451 to 453, wherein ABM3 comprises the CDR sequences of BCMA-10.

[1602] 464. The CD19 binding molecule of any one of embodiments 451 to 453, wherein ABM3 comprises the CDR sequences of BCMA-11.

[1603] 465. The CD19 binding molecule of any one of embodiments 451 to 453, wherein ABM3 comprises the CDR sequences of BCMA-12.

[1604] 466. The CD19 binding molecule of any one of embodiments 451 to 453, wherein ABM3 comprises the CDR sequences of BCMA-13.

[1605] 467. The CD19 binding molecule of any one of embodiments 451 to 453, wherein ABM3 comprises the CDR sequences of BCMA-14.

[1606] 468. The CD19 binding molecule of any one of embodiments 451 to 453, wherein ABM3 comprises the CDR sequences of BCMA-15.

[1607] 469. The CD19 binding molecule of any one of embodiments 451 to 453, wherein ABM3 comprises the CDR sequences of BCMA-16.

[1608] 470. The CD19 binding molecule of any one of embodiments 451 to 453, wherein ABM3 comprises the CDR sequences of BCMA-17.

[1609] 471. The CD19 binding molecule of any one of embodiments 451 to 453, wherein ABM3 comprises the CDR sequences of BCMA-18.

[1610] 472. The CD19 binding molecule of any one of embodiments 451 to 453, wherein ABM3 comprises the CDR sequences of BCMA-19.

[1611] 473. The CD19 binding molecule of any one of embodiments 451 to 453, wherein ABM3 comprises the CDR sequences of BCMA-20.

[1612] 474. The CD19 binding molecule of any one of embodiments 451 to 453, wherein ABM3 comprises the CDR sequences of BCMA-21.

[1613] 475. The CD19 binding molecule of any one of embodiments 451 to 453, wherein ABM3 comprises the CDR sequences of BCMA-22.

[1614] 476. The CD19 binding molecule of any one of embodiments 451 to 453, wherein ABM3 comprises the CDR sequences of BCMA-23.

[1615] 477. The CD19 binding molecule of any one of embodiments 451 to 453, wherein ABM3 comprises the CDR sequences of BCMA-24.

[1616] 478. The CD19 binding molecule of any one of embodiments 451 to 453, wherein ABM3 comprises the CDR sequences of BCMA-25.

[1617] 479. The CD19 binding molecule of any one of embodiments 451 to 453, wherein ABM3 comprises the CDR sequences of BCMA-26.

[1618] 480. The CD19 binding molecule of any one of embodiments 451 to 453, wherein ABM3 comprises the CDR sequences of BCMA-27.

[1619] 481. The CD19 binding molecule of any one of embodiments 451 to 453, wherein ABM3 comprises the CDR sequences of BCMA-28.

[1620] 482. The CD19 binding molecule of any one of embodiments 451 to 453, wherein ABM3 comprises the CDR sequences of BCMA-29.

[1621] 483. The CD19 binding molecule of any one of embodiments 451 to 453, wherein ABM3 comprises the CDR sequences of BCMA-30.

[1622] 484. The CD19 binding molecule of any one of embodiments 451 to 453, wherein ABM3 comprises the CDR sequences of BCMA-31.

[1623] 485. The CD19 binding molecule of any one of embodiments 451 to 453, wherein ABM3 comprises the CDR sequences of BCMA-32.

[1624] 486. The CD19 binding molecule of any one of embodiments 451 to 453, wherein ABM3 comprises the CDR sequences of BCMA-33.

[1625] 487. The CD19 binding molecule of any one of embodiments 451 to 453, wherein ABM3 comprises the CDR sequences of BCMA-34.

[1626] 488. The CD19 binding molecule of any one of embodiments 451 to 453, wherein ABM3 comprises the CDR sequences of BCMA-35.

[1627] 489. The CD19 binding molecule of any one of embodiments 451 to 453, wherein ABM3 comprises the CDR sequences of BCMA-36.

[1628] 490. The CD19 binding molecule of any one of embodiments 451 to 453, wherein ABM3 comprises the CDR sequences of BCMA-37.

[1629] 491. The CD19 binding molecule of any one of embodiments 451 to 453, wherein ABM3 comprises the CDR sequences of BCMA-38.

[1630] 492. The CD19 binding molecule of any one of embodiments 451 to 453, wherein ABM3 comprises the CDR sequences of BCMA-39.

[1631] 493. The CD19 binding molecule of any one of embodiments 451 to 453, wherein ABM3 comprises the CDR sequences of BCMA-40.

[1632] 494. The CD19 binding molecule of any one of embodiments 1 to 493, wherein the first variant Fc region and the second variant Fc region comprise L234A, L235A, and G237A (“LALAGA”) substitutions, wherein the amino acid residues are numbered according to the EU numbering system.

[1633] 495. The CD19 binding molecule of any one of embodiments 1 to 493, wherein the first variant Fc region and the second variant Fc region comprise L234A, L235A, S267K, and P329A (“LALASKPA”) substitutions, wherein the amino acid residues are numbered according to the EU numbering system.

[1634] 496. The CD19 binding molecule of any one of embodiments 1 to 493, wherein the first variant Fc region and the second variant Fc region comprise D265A, P329A, and S267K (“DAPASK”) substitutions, wherein the amino acid residues are numbered according to the EU numbering system.

[1635] 497. The CD19 binding molecule of any one of embodiments 1 to 493, wherein the first variant Fc region and the second variant Fc region comprise G237A, D265A, and P329A (“GADAPA”) substitutions, wherein the amino acid residues are numbered according to the EU numbering system.

[1636] 498. The CD19 binding molecule of any one of embodiments 1 to 493, wherein the first variant Fc region and the second variant Fc region comprise G237A, D265A, P329A, and S267K (“GADAPASK”) substitutions, wherein the amino acid residues are numbered according to the EU numbering system.

[1637] 499. The CD19 binding molecule of any one of embodiments 1 to 493, wherein the first variant Fc region and the second variant Fc region comprise L234A, L235A, and P329G (“LALAPG”) substitutions, wherein the amino acid residues are numbered according to the EU numbering system.

[1638] 500. The CD19 binding molecule of any one of embodiments 1 to 493, wherein the first variant Fc region and the second variant Fc region comprise L234A, L235A, and P329A (“LALAPA”) substitutions, wherein the amino acid residues are numbered according to the EU numbering system.

[1639] 501. The CD19 binding molecule of any one of embodiments 1 to 500, wherein the first variant Fc region and/or the second variant Fc region comprises a sequence having at least 95% identity to FCV-1, FCV-2, FCV-3, FCV-4, FCV-5, FCV-6, or FCV-7.

[1640] 502. The CD19 binding molecule of embodiment 501, wherein the first variant Fc region and/or the second variant Fc region comprises a sequence having at least 95% identity to FCV-1.

[1641] 503. The CD19 binding molecule of embodiment 501, wherein the first variant Fc region and/or the second variant Fc region comprises a sequence having at least 96% identity to FCV-1.

[1642] 504. The CD19 binding molecule of embodiment 501, wherein the first variant Fc region and/or the second variant Fc region comprises a sequence having at least 97% identity to FCV-1.

[1643] 505. The CD19 binding molecule of embodiment 501, wherein the first variant Fc region and/or the second variant Fc region comprises a sequence having at least 98% identity to FCV-1.

[1644] 506. The CD19 binding molecule of embodiment 501, wherein the first variant Fc region and/or the second variant Fc region comprises a sequence having at least 99% identity to FCV-1.

[1645] 507. The CD19 binding molecule of embodiment 501, wherein the first variant Fc region and/or the second variant Fc region comprises a sequence having at least 95% identity to FCV-2.

[1646] 508. The CD19 binding molecule of embodiment 501, wherein the first variant Fc region and/or the second variant Fc region comprises a sequence having at least 96% identity to FCV-2.

[1647] 509. The CD19 binding molecule of embodiment 501, wherein the first variant Fc region and/or the second variant Fc region comprises a sequence having at least 97% identity to FCV-2.

[1648] 510. The CD19 binding molecule of embodiment 501, wherein the first variant Fc region and/or the second variant Fc region comprises a sequence having at least 98% identity to FCV-2.

[1649] 511. The CD19 binding molecule of embodiment 501, wherein the first variant Fc region and/or the second variant Fc region comprises a sequence having at least 99% identity to FCV-2.

[1650] 512. The CD19 binding molecule of embodiment 501, wherein the first variant Fc region and/or the second variant Fc region comprises a sequence having at least 95% identity to FCV-3.

[1651] 513. The CD19 binding molecule of embodiment 501, wherein the first variant Fc region and/or the second variant Fc region comprises a sequence having at least 96% identity to FCV-3.

[1652] 514. The CD19 binding molecule of embodiment 501, wherein the first variant Fc region and/or the second variant Fc region comprises a sequence having at least 97% identity to FCV-3.

[1653] 515. The CD19 binding molecule of embodiment 501, wherein the first variant Fc region and/or the second variant Fc region comprises a sequence having at least 98% identity to FCV-3.

[1654] 516. The CD19 binding molecule of embodiment 501, wherein the first variant Fc region and/or the second variant Fc region comprises a sequence having at least 99% identity to FCV-3.

[1655] 517. The CD19 binding molecule of embodiment 501, wherein the first variant Fc region and/or the second variant Fc region comprises a sequence having at least 95% identity to FCV-4.

[1656] 518. The CD19 binding molecule of embodiment 501, wherein the first variant Fc region and/or the second variant Fc region comprises a sequence having at least 96% identity to FCV-4.

[1657] 519. The CD19 binding molecule of embodiment 501, wherein the first variant Fc region and/or the second variant Fc region comprises a sequence having at least 97% identity to FCV-4.

[1658] 520. The CD19 binding molecule of embodiment 501, wherein the first variant Fc region and/or the second variant Fc region comprises a sequence having at least 98% identity to FCV-4.

[1659] 521. The CD19 binding molecule of embodiment 501, wherein the first variant Fc region and/or the second variant Fc region comprises a sequence having at least 99% identity to FCV-4.

[1660] 522. The CD19 binding molecule of embodiment 501, wherein the first variant Fc region and/or the second variant Fc region comprises a sequence having at least 95% identity to FCV-5.

[1661] 523. The CD19 binding molecule of embodiment 501, wherein the first variant Fc region and/or the second variant Fc region comprises a sequence having at least 96% identity to FCV-5.

[1662] 524. The CD19 binding molecule of embodiment 501, wherein the first variant Fc region and/or the second variant Fc region comprises a sequence having at least 97% identity to FCV-5.

[1663] 525. The CD19 binding molecule of embodiment 501, wherein the first variant Fc region and/or the second variant Fc region comprises a sequence having at least 98% identity to FCV-5.

[1664] 526. The CD19 binding molecule of embodiment 501, wherein the first variant Fc region and/or the second variant Fc region comprises a sequence having at least 99% identity to FCV-5.

[1665] 527. The CD19 binding molecule of embodiment 501, wherein the first variant Fc region and/or the second variant Fc region comprises a sequence having at least 95% identity to FCV-6.

[1666] 528. The CD19 binding molecule of embodiment 501, wherein the first variant Fc region and/or the second variant Fc region comprises a sequence having at least 96% identity to FCV-6.

[1667] 529. The CD19 binding molecule of embodiment 501, wherein the first variant Fc region and/or the second variant Fc region comprises a sequence having at least 97% identity to FCV-6.

[1668] 530. The CD19 binding molecule of embodiment 501, wherein the first variant Fc region and/or the second variant Fc region comprises a sequence having at least 98% identity to FCV-6.

[1669] 531. The CD19 binding molecule of embodiment 501, wherein the first variant Fc region and/or the second variant Fc region comprises a sequence having at least 99% identity to FCV-6.

[1670] 532. The CD19 binding molecule of embodiment 501, wherein the first variant Fc region and/or the second variant Fc region comprises a sequence having at least 95% identity to FCV-7.

[1671] 533. The CD19 binding molecule of embodiment 501, wherein the first variant Fc region and/or the second variant Fc region comprises a sequence having at least 96% identity to FCV-7.

[1672] 534. The CD19 binding molecule of embodiment 501, wherein the first variant Fc region and/or the second variant Fc region comprises a sequence having at least 97% identity to FCV-7.

[1673] 535. The CD19 binding molecule of embodiment 501, wherein the first variant Fc region and/or the second variant Fc region comprises a sequence having at least 98% identity to FCV-7.

[1674] 536. The CD19 binding molecule of embodiment 501, wherein the first variant Fc region and/or the second variant Fc region comprises a sequence having at least 99% identity to FCV-7.

[1675] 537. The CD19 binding molecule of embodiment 501, wherein the first variant Fc region and/or the second variant Fc region comprises a sequence having 100% identity to FCV-1.

[1676] 538. The CD19 binding molecule of embodiment 501, wherein the first variant Fc region and/or the second variant Fc region comprises a sequence having 100% identity to FCV-2.

[1677] 539. The CD19 binding molecule of embodiment 501, wherein the first variant Fc region and/or the second variant Fc region comprises a sequence having 100% identity to FCV-3.

[1678] 540. The CD19 binding molecule of embodiment 501, wherein the first variant Fc region and/or the second variant Fc region comprises a sequence having 100% identity to FCV-4.

[1679] 541. The CD19 binding molecule of embodiment 501, wherein the first variant Fc region and/or the second variant Fc region comprises a sequence having 100% identity to FCV-5.

[1680] 542. The CD19 binding molecule of embodiment 501, wherein the first variant Fc region and/or the second variant Fc region comprises a sequence having 100% identity to FCV-6.

[1681] 543. The CD19 binding molecule of embodiment 501, wherein the first variant Fc region and/or the second variant Fc region comprises a sequence having 100% identity to FCV-7.

[1682] 544. The CD19 binding molecule of any one of embodiments 1 to 543, wherein the first variant Fc region and the second variant Fc region together form an Fc heterodimer.

[1683] 545. The CD19 binding molecule of embodiment 544, wherein the first and second variant Fc regions comprise the amino acid substitutions S364K/E357Q: L368D/K370S.

[1684] 546. The CD19 binding molecule of embodiments 544, wherein the first and second variant Fc regions comprise the amino acid substitutions L368D/K370S: S364K.

[1685] 547. The CD19 binding molecule of embodiment 544, wherein the first and second variant Fc regions comprise the amino acid substitutions L368E/K370S: S364K.

[1686] 548. The CD19 binding molecule of embodiment 544, wherein the first and second variant Fc regions comprise the amino acid substitutions T411T/E360E/Q362E: D401K.

[1687] 549. The CD19 binding molecule of embodiment 544, wherein the first and second variant Fc regions comprise the amino acid substitutions L368D 370S: S364/E357L.

[1688] 550. The CD19 binding molecule of embodiment 544, wherein the first and second variant Fc regions comprise the amino acid substitutions 370S: S364K/E357Q.

[1689] 551. The CD19 binding molecule of embodiment 544, wherein the first and second variant Fc regions comprise the amino acid substitutions of any one of the steric variants listed in FIG. 4 of WO 2014/110601 (reproduced in Table 4).

[1690] 552. The CD19 binding molecule of embodiment 544, wherein the first and second variant Fc regions comprise the amino acid substitutions of any one of the variants listed in FIG. 5 of WO 2014/110601 (reproduced in Table 4).

[1691] 553. The CD19 binding molecule of embodiment 544, wherein the first and second variant Fc regions comprise the amino acid substitutions of any one of the variants listed in FIG. 6 of WO 2014/110601 (reproduced in Table 4).

[1692] 554. The CD19 binding molecule of any one of embodiments 1 to 553, wherein the first variant Fc region and/or the second variant Fc region further comprises an ablation variant modification selected from the ablation variant modifications set forth in Table 3.

[1693] 555. The CD19 binding molecule of embodiment 554, wherein the ablation variant modification comprises G236R.

[1694] 556. The CD19 binding molecule of embodiment 554, wherein the ablation variant modification comprises S239G.

[1695] 557. The CD19 binding molecule of embodiment 554, wherein the ablation variant modification comprises S239K.

[1696] 558. The CD19 binding molecule of embodiment 554, wherein the ablation variant modification comprises S239Q.

[1697] 559. The CD19 binding molecule of embodiment 554, wherein the ablation variant modification comprises S239R.

[1698] 560. The CD19 binding molecule of embodiment 554, wherein the ablation variant modification comprises V266D.

[1699] 561. The CD19 binding molecule of embodiment 554, wherein the ablation variant modification comprises H268K.

[1700] 562. The CD19 binding molecule of embodiment 554, wherein the ablation variant modification comprises E269R.

[1701] 563. The CD19 binding molecule of embodiment 554, wherein the ablation variant modification comprises 299R.

[1702] 564. The CD19 binding molecule of embodiment 554, wherein the ablation variant modification comprises 299K.

[1703] 565. The CD19 binding molecule of embodiment 554, wherein the ablation variant modification comprises K322A.

[1704] 566. The CD19 binding molecule of embodiment 554, wherein the ablation variant modification comprises A327G.

[1705] 567. The CD19 binding molecule of embodiment 554, wherein the ablation variant modification comprises A327L.

[1706] 568. The CD19 binding molecule of embodiment 554, wherein the ablation variant modification comprises A327N.

[1707] 569. The CD19 binding molecule of embodiment 554, wherein the ablation variant modification comprises A327Q.

[1708] 570. The CD19 binding molecule of embodiment 554, wherein the ablation variant modification comprises L328E.

[1709] 571. The CD19 binding molecule of embodiment 554, wherein the ablation variant modification comprises L328R.

[1710] 572. The CD19 binding molecule of embodiment 554, wherein the ablation variant modification comprises A330L.

[1711] 573. The CD19 binding molecule of embodiment 554, wherein the ablation variant modification comprises A330S/P331S.

[1712] 574. The CD19 binding molecule of embodiment 554, wherein the ablation variant modification comprises 1332K.

[1713] 575. The CD19 binding molecule of embodiment 554, wherein the ablation variant modification comprises 1332R.

[1714] 576. The CD19 binding molecule of embodiment 554, wherein the ablation variant modification comprises V266D/A327Q.

[1715] 577. The CD19 binding molecule of embodiment 554, wherein the ablation variant modification comprises G236R/L328R.

[1716] 578. The CD19 binding molecule of any one of embodiments 554 to 577, wherein both variant Fc regions comprise the ablation variant modification.

[1717] 579. The CD19 binding molecule of any one of embodiments 1 to 578, wherein at least one of the Fc regions further comprises pl variant substitutions.

[1718] 580. The CD19 binding molecule of embodiment 579 wherein the pl variant substitutions are selected from Table 4.

[1719] 581. The CD19 binding molecule of embodiment 580, wherein the pl variant substitutions comprise the substitutions present in pl_ISO(−).

[1720] 582. The CD19 binding molecule of embodiment 580, wherein the pl variant substitutions comprise the substitutions present in pl_(−)_isosteric_A.

[1721] 583. The CD19 binding molecule of embodiment 580, wherein the pl variant substitutions comprise the substitutions present in pl_(−)_isosteric_B.

[1722] 584. The CD19 binding molecule of embodiment 580, wherein the pl variant substitutions comprise the substitutions present in Pl_ISO(+RR).

[1723] 585. The CD19 binding molecule of embodiment 580, wherein the pl variant substitutions comprise the substitutions present in pl_ISO(+).

[1724] 586. The CD19 binding molecule of embodiment 580, wherein the pl variant substitutions comprise the substitutions present in pl_(+)_isosteric_A.

[1725] 587. The CD19 binding molecule of embodiment 580, wherein the pl variant substitutions comprise the substitutions present in pl_(+)_isosteric_B.

[1726] 588. The CD19 binding molecule of embodiment 580, wherein the pl variant substitutions comprise the substitutions present in pl_(+)_isosteric_E269Q/E272Q.

[1727] 589. The CD19 binding molecule of embodiment 580, wherein the pl variant substitutions comprise the substitutions present in pl_(+)_isosteric_E269Q/E283Q.

[1728] 590. The CD19 binding molecule of embodiment 580, wherein the pl variant substitutions comprise the substitutions present in pl_(+)_isosteric_E27201E283Q.

[1729] 591. The CD19 binding molecule of embodiment 580, wherein the pl variant substitutions comprise the substitutions present in pl_(+)_isosteric_E269Q.

[1730] 592. The CD19 binding molecule of any one of embodiments 1 to 591, wherein the first and/or second Fc region further comprises one or more amino acid substitution(s) selected from 434A, 434S, 428L, 308F, 2591, 428L/434S, 2591/308F, 4361/428L, 4361 or V/434S, 436V/428L, 252Y, 252Y/254T/256E, 2591/308F/428L, 236A, 239D, 239E, 332E, 332D, 239D/332E, 267D, 267E, 328F, 267E/328F, 236A/332E, 239D/332E/330Y, 239D, 332E/330L, 236R, 328R, 236R/328R, 236N/267E, 243L, 298A and 299T.

[1731] 593. The CD19 binding molecule of any one of embodiments 1 to 591, wherein the first and/or second Fc region further comprises the amino acid substitution 434A, 434S or 434V.

[1732] 594. The CD19 binding molecule of embodiment 593, wherein the first and/or second Fc region further comprises the amino acid substitution 428L.

[1733] 595. The CD19 binding molecule of any one of embodiments 593 to 594, wherein the first and/or second Fc region further the amino acid substitution 308F.

[1734] 596. The CD19 binding molecule of any one of embodiments 593 to 595, wherein the first and/or second Fc region further comprises the amino acid substitution 2591.

[1735] 597. The CD19 binding molecule of any one of embodiments 593 to 596, wherein the first and/or second Fc region further comprises the amino acid substitution 4361.

[1736] 598. The CD19 binding molecule of any one of embodiments 593 to 597, wherein the first and/or second Fc region further comprises the amino acid substitution 252Y.

[1737] 599. The CD19 binding molecule of any one of embodiments 593 to 598, wherein the first and/or second Fc region further comprises the amino acid substitution 254T.

[1738] 600. The CD19 binding molecule of any one of embodiments 593 to 599, wherein the first and/or second Fc region further comprises the amino acid substitution 256E.

[1739] 601. The CD19 binding molecule of any one of embodiments 593 to 600, wherein the first and/or second Fc region further comprises the amino acid substitution 239D or 239E.

[1740] 602. The CD19 binding molecule of any one of embodiments 593 to 601, wherein the first and/or second Fc region further comprises the amino acid substitution 332E or 332D.

[1741] 603. The CD19 binding molecule of any one of embodiments 593 to 602, wherein the first and/or second Fc region further comprises the amino acid substitution 267D or 267E.

[1742] 604. The CD19 binding molecule of any one of embodiments 593 to 603, wherein the first and/or second Fc region further comprises the amino acid substitution 330L.

[1743] 605. The CD19 binding molecule of any one of embodiments 593 to 604, wherein the first and/or second Fc region further comprises the amino acid substitution 236R or 236N.

[1744] 606. The CD19 binding molecule of any one of embodiments 593 to 605, wherein the first and/or second Fc region further comprises the amino acid substitution 328R.

[1745] 607. The CD19 binding molecule of any one of embodiments 593 to 606, wherein the first and/or second Fc region further comprises the amino acid substitution 243L.

[1746] 608. The CD19 binding molecule of any one of embodiments 593 to 607, wherein the first and/or second Fc region further comprises the amino acid substitution 298A.

[1747] 609. The CD19 binding molecule of any one of embodiments 593 to 608, wherein the first and/or second Fc region further comprises the amino acid substitution 299T.

[1748] 610. The CD19 binding molecule of any one of embodiments 1 to 609, wherein the first variant Fc region comprises the pl variant substitutions N208D/Q295E/N384D/Q418E/N421D (pl_(−)_isosteric_A).

[1749] 611. The CD19 binding molecule of any one of embodiments 1 to 610, wherein the second variant Fc region comprises the pl variant substitutions N208D/Q295E/N384D/Q418E/N421D (pl_(−)_isosteric_A).

[1750] 612. The CD19 binding molecule of embodiment 544, wherein the Fc heterodimer comprises any of the Fc modifications set forth in Table 4.

[1751] 613. The CD19 binding molecule of embodiment 544, wherein the Fc heterodimer comprises knob-in-hole (“KIH”) modifications.

[1752] 614. The CD19 binding molecule of embodiment 613, wherein the first and second variant Fc regions comprise the amino acid substitutions T366W: T366S/L368A/Y407V.

[1753] 615. The CD19 binding molecule of any one of 1 to 614, wherein the Fc domain has reduced or undetectable binding affinity to a Fc gamma receptor compared to a CD19 binding molecule comprising a wild-type human IgG1 Fc domain, optionally measured by surface plasmon resonance using a Biacore T200 instrument, wherein the Fc gamma receptor is selected from the group consisting of Fc gamma RIA and Fc gamma RIIIa V158 variant.

[1754] 616. The CD19 binding molecule of any one of embodiments 1 to 615, wherein the CD19 binding molecule has reduced or undetectable effector function compared to a CD19 binding molecule comprising the wild-type human IgG1 Fc domain.

[1755] 617. The CD19 binding molecule of any one of 1 to 616, wherein the binding molecule is capable of binding to one or more antigens without triggering detectable antibody-dependent cell-mediated cytotoxicity (ADCC), antibody-dependent cellular phagocytosis (ADCP), or complement dependent cytotoxicity (CDC).

[1756] 618. The CD19 binding molecule of any one of embodiments 1 to 617, wherein the Fc domain has modified disulfide bond architecture.

[1757] 619. The CD19 binding molecule of any one of embodiments 1 to 618, wherein the Fc domain has altered glycosylation patterns.

[1758] 620. The CD19 binding molecule of any one of embodiments 1 to 619, wherein the Fc domain comprises a hinge region.

[1759] 621. The CD19 binding molecule of embodiment 620, wherein the hinge region comprises any one of the hinge regions described in Section 7.4.2.

[1760] 622. The CD19 binding molecule of embodiment 621, wherein the hinge region comprises the amino acid sequence of the hinge region designated H1.

[1761] 623. The CD19 binding molecule of embodiment 621, wherein the hinge region comprises the amino acid sequence of the hinge region designated H2.

[1762] 624. The CD19 binding molecule of embodiment 621, wherein the hinge region comprises the amino acid sequence of the hinge region designated H3.

[1763] 625. The CD19 binding molecule of embodiment 621, wherein the hinge region comprises the amino acid sequence of the hinge region designated H4.

[1764] 626. The CD19 binding molecule of embodiment 621, wherein the hinge region comprises the amino acid sequence of the hinge region designated H5.

[1765] 627. The CD19 binding molecule of embodiment 621, wherein the hinge region comprises the amino acid sequence of the hinge region designated H6.

[1766] 628. The CD19 binding molecule of embodiment 621, wherein the hinge region comprises the amino acid sequence of the hinge region designated H7.

[1767] 629. The CD19 binding molecule of embodiment 621, wherein the hinge region comprises the amino acid sequence of the hinge region designated H8.

[1768] 630. The CD19 binding molecule of embodiment 621, wherein the hinge region comprises the amino acid sequence of the hinge region designated H9.

[1769] 631. The CD19 binding molecule of embodiment 621, wherein the hinge region comprises the amino acid sequence of the hinge region designated H10.

[1770] 632. The CD19 binding molecule of embodiment 621, wherein the hinge region comprises the amino acid sequence of the hinge region designated H11.

[1771] 633. The CD19 binding molecule of embodiment 621, wherein the hinge region comprises the amino acid sequence of the hinge region designated H12.

[1772] 634. The CD19 binding molecule of embodiment 621, wherein the hinge region comprises the amino acid sequence of the hinge region designated H13.

[1773] 635. The CD19 binding molecule of embodiment 621, wherein the hinge region comprises the amino acid sequence of the hinge region designated H14.

[1774] 636. The CD19 binding molecule of embodiment 621, wherein the hinge region comprises the amino acid sequence of the hinge region designated H15.

[1775] 637. The CD19 binding molecule of embodiment 621, wherein the hinge region comprises the amino acid sequence of the hinge region designated H16.

[1776] 638. The CD19 binding molecule of embodiment 621, wherein the hinge region comprises the amino acid sequence of the hinge region designated H17.

[1777] 639. The CD19 binding molecule of embodiment 621, wherein the hinge region comprises the amino acid sequence of the hinge region designated H18.

[1778] 640. The CD19 binding molecule of embodiment 621, wherein the hinge region comprises the amino acid sequence of the hinge region designated H19.

[1779] 641. The CD19 binding molecule of embodiment 621, wherein the hinge region comprises the amino acid sequence of the hinge region designated H20.

[1780] 642. The CD19 binding molecule of embodiment 621, wherein the hinge region comprises the amino acid sequence of the hinge region designated H21.

[1781] 643. The CD19 binding molecule of any one of embodiments 16 to 642, which comprises at least one scFv domain.

[1782] 644. The CD19 binding molecule of embodiment 643, wherein at least one scFv comprises a linker connecting the VH and VL domains.

[1783] 645. The CD19 binding molecule of embodiment 644, wherein the linker is 5 to 25 amino acids in length.

[1784] 646. The CD19 binding molecule of embodiment 645, wherein the linker is 12 to 20 amino acids in length.

[1785] 647. The CD19 binding molecule of any one of embodiments 644 to 646, wherein the linker is a charged linker and/or a flexible linker.

[1786] 648. The CD19 binding molecule of any one of embodiments 644 to 647, wherein the linker is selected from any one of linkers L1 through L54.

[1787] 649. The CD19 binding molecule of embodiment 648, wherein the linker region comprises the amino acid sequence of the linker designated L1.

[1788] 650. The CD19 binding molecule of embodiment 648, wherein the linker region comprises the amino acid sequence of the linker designated L2.

[1789] 651. The CD19 binding molecule of embodiment 648, wherein the linker region comprises the amino acid sequence of the linker designated L3.

[1790] 652. The CD19 binding molecule of embodiment 648, wherein the linker region comprises the amino acid sequence of the linker designated L4.

[1791] 653. The CD19 binding molecule of embodiment 648, wherein the linker region comprises the amino acid sequence of the linker designated L5.

[1792] 654. The CD19 binding molecule of embodiment 648, wherein the linker region comprises the amino acid sequence of the linker designated L6.

[1793] 655. The CD19 binding molecule of embodiment 648, wherein the linker region comprises the amino acid sequence of the linker designated L7.

[1794] 656. The CD19 binding molecule of embodiment 648, wherein the linker region comprises the amino acid sequence of the linker designated L8.

[1795] 657. The CD19 binding molecule of embodiment 648, wherein the linker region comprises the amino acid sequence of the linker designated L9.

[1796] 658. The CD19 binding molecule of embodiment 648, wherein the linker region comprises the amino acid sequence of the linker designated L10.

[1797] 659. The CD19 binding molecule of embodiment 648, wherein the linker region comprises the amino acid sequence of the linker designated L11.

[1798] 660. The CD19 binding molecule of embodiment 648, wherein the linker region comprises the amino acid sequence of the linker designated L12.

[1799] 661. The CD19 binding molecule of embodiment 648, wherein the linker region comprises the amino acid sequence of the linker designated L13.

[1800] 662. The CD19 binding molecule of embodiment 648, wherein the linker region comprises the amino acid sequence of the linker designated L14.

[1801] 663. The CD19 binding molecule of embodiment 648, wherein the linker region comprises the amino acid sequence of the linker designated L15.

[1802] 664. The CD19 binding molecule of embodiment 648, wherein the linker region comprises the amino acid sequence of the linker designated L16.

[1803] 665. The CD19 binding molecule of embodiment 648, wherein the linker region comprises the amino acid sequence of the linker designated L17.

[1804] 666. The CD19 binding molecule of embodiment 648, wherein the linker region comprises the amino acid sequence of the linker designated L18.

[1805] 667. The CD19 binding molecule of embodiment 648, wherein the linker region comprises the amino acid sequence of the linker designated L19.

[1806] 668. The CD19 binding molecule of embodiment 648, wherein the linker region comprises the amino acid sequence of the linker designated L20.

[1807] 669. The CD19 binding molecule of embodiment 648, wherein the linker region comprises the amino acid sequence of the linker designated L21.

[1808] 670. The CD19 binding molecule of embodiment 648, wherein the linker region comprises the amino acid sequence of the linker designated L22.

[1809] 671. The CD19 binding molecule of embodiment 648, wherein the linker region comprises the amino acid sequence of the linker designated L23.

[1810] 672. The CD19 binding molecule of embodiment 648, wherein the linker region comprises the amino acid sequence of the linker designated L24.

[1811] 673. The CD19 binding molecule of embodiment 648, wherein the linker region comprises the amino acid sequence of the linker designated L25.

[1812] 674. The CD19 binding molecule of embodiment 648, wherein the linker region comprises the amino acid sequence of the linker designated L26.

[1813] 675. The CD19 binding molecule of embodiment 648, wherein the linker region comprises the amino acid sequence of the linker designated L27.

[1814] 676. The CD19 binding molecule of embodiment 648, wherein the linker region comprises the amino acid sequence of the linker designated L28.

[1815] 677. The CD19 binding molecule of embodiment 648, wherein the linker region comprises the amino acid sequence of the linker designated L29.

[1816] 678. The CD19 binding molecule of embodiment 648, wherein the linker region comprises the amino acid sequence of the linker designated L30.

[1817] 679. The CD19 binding molecule of embodiment 648, wherein the linker region comprises the amino acid sequence of the linker designated L31.

[1818] 680. The CD19 binding molecule of embodiment 648, wherein the linker region comprises the amino acid sequence of the linker designated L32.

[1819] 681. The CD19 binding molecule of embodiment 648, wherein the linker region comprises the amino acid sequence of the linker designated L33.

[1820] 682. The CD19 binding molecule of embodiment 648, wherein the linker region comprises the amino acid sequence of the linker designated L34.

[1821] 683. The CD19 binding molecule of embodiment 648, wherein the linker region comprises the amino acid sequence of the linker designated L35.

[1822] 684. The CD19 binding molecule of embodiment 648, wherein the linker region comprises the amino acid sequence of the linker designated L36.

[1823] 685. The CD19 binding molecule of embodiment 648, wherein the linker region comprises the amino acid sequence of the linker designated L37.

[1824] 686. The CD19 binding molecule of embodiment 648, wherein the linker region comprises the amino acid sequence of the linker designated L38.

[1825] 687. The CD19 binding molecule of embodiment 648, wherein the linker region comprises the amino acid sequence of the linker designated L39.

[1826] 688. The CD19 binding molecule of embodiment 648, wherein the linker region comprises the amino acid sequence of the linker designated L40.

[1827] 689. The CD19 binding molecule of embodiment 648, wherein the linker region comprises the amino acid sequence of the linker designated L41.

[1828] 690. The CD19 binding molecule of embodiment 648, wherein the linker region comprises the amino acid sequence of the linker designated L42.

[1829] 691. The CD19 binding molecule of embodiment 648, wherein the linker region comprises the amino acid sequence of the linker designated L43.

[1830] 692. The CD19 binding molecule of embodiment 648, wherein the linker region comprises the amino acid sequence of the linker designated L44.

[1831] 693. The CD19 binding molecule of embodiment 648, wherein the linker region comprises the amino acid sequence of the linker designated L45.

[1832] 694. The CD19 binding molecule of embodiment 648, wherein the linker region comprises the amino acid sequence of the linker designated L46.

[1833] 695. The CD19 binding molecule of embodiment 648, wherein the linker region comprises the amino acid sequence of the linker designated L47.

[1834] 696. The CD19 binding molecule of embodiment 648, wherein the linker region comprises the amino acid sequence of the linker designated L48.

[1835] 697. The CD19 binding molecule of embodiment 648, wherein the linker region comprises the amino acid sequence of the linker designated L49.

[1836] 698. The CD19 binding molecule of embodiment 648, wherein the linker region comprises the amino acid sequence of the linker designated L50.

[1837] 699. The CD19 binding molecule of embodiment 648, wherein the linker region comprises the amino acid sequence of the linker designated L51.

[1838] 700. The CD19 binding molecule of embodiment 648, wherein the linker region comprises the amino acid sequence of the linker designated L52.

[1839] 701. The CD19 binding molecule of embodiment 648, wherein the linker region comprises the amino acid sequence of the linker designated L53.

[1840] 702. The CD19 binding molecule of embodiment 648, wherein the linker region comprises the amino acid sequence of the linker designated L54.

[1841] 703. The CD19 binding molecule of any one of embodiments 16 to 702, which comprises at least one Fab domain.

[1842] 704. The CD19 binding molecule of embodiment 703, wherein at least one Fab domain comprises any of the Fab heterodimerization modifications set forth in Table 2.

[1843] 705. The CD19 binding molecule of embodiment 704, wherein at least one Fab domain comprises the Fab heterodimerization modifications designated as F1.

[1844] 706. The CD19 binding molecule of embodiment 704, wherein at least one Fab domain comprises the Fab heterodimerization modifications designated as F2.

[1845] 707. The CD19 binding molecule of embodiment 704, wherein at least one Fab domain comprises the Fab heterodimerization modifications designated as F3.

[1846] 708. The CD19 binding molecule of embodiment 704, wherein at least one Fab domain comprises the Fab heterodimerization modifications designated as F4.

[1847] 709. The CD19 binding molecule of embodiment 704, wherein at least one Fab domain comprises the Fab heterodimerization modifications designated as F5.

[1848] 710. The CD19 binding molecule of embodiment 704, wherein at least one Fab domain comprises the Fab heterodimerization modifications designated as F6.

[1849] 711. The CD19 binding molecule of embodiment 704, wherein at least one Fab domain comprises the Fab heterodimerization modifications designated as F7.

[1850] 712. The CD19 binding molecule of anyone of embodiments 16 to 711, which comprises at least two ABMs, an ABM and an ABM chain, or two ABM chains connected to one another via a linker.

[1851] 713. The CD19 binding molecule of embodiment 712, wherein the linker is 5 to 25 amino acids in length.

[1852] 714. The CD19 binding molecule of embodiment 713, wherein the linker is 12 to 20 amino acids in length.

[1853] 715. The CD19 binding molecule of any one of embodiments 712 to 714, wherein the linker is a charged linker and/or a flexible linker.

[1854] 716. The CD19 binding molecule of any one of embodiments 712 to 715, wherein the linker is selected from any one of linkers L1 through L54.

[1855] 717. The CD19 binding molecule of embodiment 716, wherein the linker region comprises the amino acid sequence of the linker designated L1.

[1856] 718. The CD19 binding molecule of embodiment 716, wherein the linker region comprises the amino acid sequence of the linker designated L2.

[1857] 719. The CD19 binding molecule of embodiment 716, wherein the linker region comprises the amino acid sequence of the linker designated L3.

[1858] 720. The CD19 binding molecule of embodiment 716, wherein the linker region comprises the amino acid sequence of the linker designated L4.

[1859] 721. The CD19 binding molecule of embodiment 716, wherein the linker region comprises the amino acid sequence of the linker designated L5.

[1860] 722. The CD19 binding molecule of embodiment 716, wherein the linker region comprises the amino acid sequence of the linker designated L6.

[1861] 723. The CD19 binding molecule of embodiment 716, wherein the linker region comprises the amino acid sequence of the linker designated L7.

[1862] 724. The CD19 binding molecule of embodiment 716, wherein the linker region comprises the amino acid sequence of the linker designated L8.

[1863] 725. The CD19 binding molecule of embodiment 716, wherein the linker region comprises the amino acid sequence of the linker designated L9.

[1864] 726. The CD19 binding molecule of embodiment 716, wherein the linker region comprises the amino acid sequence of the linker designated L10.

[1865] 727. The CD19 binding molecule of embodiment 716, wherein the linker region comprises the amino acid sequence of the linker designated L11.

[1866] 728. The CD19 binding molecule of embodiment 716, wherein the linker region comprises the amino acid sequence of the linker designated L12.

[1867] 729. The CD19 binding molecule of embodiment 716, wherein the linker region comprises the amino acid sequence of the linker designated L13.

[1868] 730. The CD19 binding molecule of embodiment 716, wherein the linker region comprises the amino acid sequence of the linker designated L14.

[1869] 731. The CD19 binding molecule of embodiment 716, wherein the linker region comprises the amino acid sequence of the linker designated L15.

[1870] 732. The CD19 binding molecule of embodiment 716, wherein the linker region comprises the amino acid sequence of the linker designated L16.

[1871] 733. The CD19 binding molecule of embodiment 716, wherein the linker region comprises the amino acid sequence of the linker designated L17.

[1872] 734. The CD19 binding molecule of embodiment 716, wherein the linker region comprises the amino acid sequence of the linker designated L18.

[1873] 735. The CD19 binding molecule of embodiment 716, wherein the linker region comprises the amino acid sequence of the linker designated L19.

[1874] 736. The CD19 binding molecule of embodiment 716, wherein the linker region comprises the amino acid sequence of the linker designated L20.

[1875] 737. The CD19 binding molecule of embodiment 716, wherein the linker region comprises the amino acid sequence of the linker designated L21.

[1876] 738. The CD19 binding molecule of embodiment 716, wherein the linker region comprises the amino acid sequence of the linker designated L22.

[1877] 739. The CD19 binding molecule of embodiment 716, wherein the linker region comprises the amino acid sequence of the linker designated L23.

[1878] 740. The CD19 binding molecule of embodiment 716, wherein the linker region comprises the amino acid sequence of the linker designated L24.

[1879] 741. The CD19 binding molecule of embodiment 716, wherein the linker region comprises the amino acid sequence of the linker designated L25.

[1880] 742. The CD19 binding molecule of embodiment 716, wherein the linker region comprises the amino acid sequence of the linker designated L26.

[1881] 743. The CD19 binding molecule of embodiment 716, wherein the linker region comprises the amino acid sequence of the linker designated L27.

[1882] 744. The CD19 binding molecule of embodiment 716, wherein the linker region comprises the amino acid sequence of the linker designated L28.

[1883] 745. The CD19 binding molecule of embodiment 716, wherein the linker region comprises the amino acid sequence of the linker designated L29.

[1884] 746. The CD19 binding molecule of embodiment 716, wherein the linker region comprises the amino acid sequence of the linker designated L30.

[1885] 747. The CD19 binding molecule of embodiment 716, wherein the linker region comprises the amino acid sequence of the linker designated L31.

[1886] 748. The CD19 binding molecule of embodiment 716, wherein the linker region comprises the amino acid sequence of the linker designated L32.

[1887] 749. The CD19 binding molecule of embodiment 716, wherein the linker region comprises the amino acid sequence of the linker designated L33.

[1888] 750. The CD19 binding molecule of embodiment 716, wherein the linker region comprises the amino acid sequence of the linker designated L34.

[1889] 751. The CD19 binding molecule of embodiment 716, wherein the linker region comprises the amino acid sequence of the linker designated L35.

[1890] 752. The CD19 binding molecule of embodiment 716, wherein the linker region comprises the amino acid sequence of the linker designated L36.

[1891] 753. The CD19 binding molecule of embodiment 716, wherein the linker region comprises the amino acid sequence of the linker designated L37.

[1892] 754. The CD19 binding molecule of embodiment 716, wherein the linker region comprises the amino acid sequence of the linker designated L38.

[1893] 755. The CD19 binding molecule of embodiment 716, wherein the linker region comprises the amino acid sequence of the linker designated L39.

[1894] 756. The CD19 binding molecule of embodiment 716, wherein the linker region comprises the amino acid sequence of the linker designated L40.

[1895] 757. The CD19 binding molecule of embodiment 716, wherein the linker region comprises the amino acid sequence of the linker designated L41.

[1896] 758. The CD19 binding molecule of embodiment 716, wherein the linker region comprises the amino acid sequence of the linker designated L42.

[1897] 759. The CD19 binding molecule of embodiment 716, wherein the linker region comprises the amino acid sequence of the linker designated L43.

[1898] 760. The CD19 binding molecule of embodiment 716, wherein the linker region comprises the amino acid sequence of the linker designated L44.

[1899] 761. The CD19 binding molecule of embodiment 716, wherein the linker region comprises the amino acid sequence of the linker designated L45.

[1900] 762. The CD19 binding molecule of embodiment 716, wherein the linker region comprises the amino acid sequence of the linker designated L46.

[1901] 763. The CD19 binding molecule of embodiment 716, wherein the linker region comprises the amino acid sequence of the linker designated L47.

[1902] 764. The CD19 binding molecule of embodiment 716, wherein the linker region comprises the amino acid sequence of the linker designated L48.

[1903] 765. The CD19 binding molecule of embodiment 716, wherein the linker region comprises the amino acid sequence of the linker designated L49.

[1904] 766. The CD19 binding molecule of embodiment 648, wherein the linker region comprises the amino acid sequence of the linker designated L50.

[1905] 767. The CD19 binding molecule of embodiment 648, wherein the linker region comprises the amino acid sequence of the linker designated L51.

[1906] 768. The CD19 binding molecule of embodiment 648, wherein the linker region comprises the amino acid sequence of the linker designated L52.

[1907] 769. The CD19 binding molecule of embodiment 648, wherein the linker region comprises the amino acid sequence of the linker designated L53.

[1908] 770. The CD19 binding molecule of embodiment 716, wherein the linker region comprises the amino acid sequence of the linker designated L54.

[1909] 771. A CD19 binding molecule comprising:
[1910] (a) a first polypeptide whose amino acid sequence comprises the amino acid sequence of SEQ ID NO:1120;
[1911] (b) a second polypeptide whose amino acid sequence comprises the amino acid sequence of SEQ ID NO:1122; and
[1912] (c) a third polypeptide whose amino acid sequence comprises the amino acid sequence of SEQ ID NO:1110.

[1913] 772. A CD19 binding molecule comprising:
[1914] (a) a first polypeptide whose amino acid sequence comprises the amino acid sequence of SEQ ID NO:1127;
[1915] (b) a second polypeptide whose amino acid sequence comprises the amino acid sequence of SEQ ID NO:1129; and
[1916] (c) a third polypeptide whose amino acid sequence comprises the amino acid sequence of SEQ ID NO:1110.

[1917] 773. A CD19 binding molecule comprising:
[1918] (a) a first polypeptide whose amino acid sequence comprises the amino acid sequence of SEQ ID NO:1124;
[1919] (b) a second polypeptide whose amino acid sequence comprises the amino acid sequence of SEQ ID NO:1126; and
[1920] (c) a third polypeptide whose amino acid sequence comprises the amino acid sequence of SEQ ID NO:1110.

[1921] 774. A CD19 binding molecule comprising:
[1922] (a) a first polypeptide whose amino acid sequence comprises the amino acid sequence of SEQ ID NO:1134;
[1923] (b) a second polypeptide whose amino acid sequence comprises the amino acid sequence of SEQ ID NO:1135; and
[1924] (c) a third polypeptide whose amino acid sequence comprises the amino acid sequence of SEQ ID NO:1110.

[1925] 775. A CD19 binding molecule comprising:
[1926] (a) a first polypeptide whose amino acid sequence comprises the amino acid sequence of SEQ ID NO:1136;
[1927] (b) a second polypeptide whose amino acid sequence comprises the amino acid sequence of SEQ ID NO:1137; and
[1928] (c) a third polypeptide whose amino acid sequence comprises the amino acid sequence of SEQ ID NO:1110.

[1929] 776. A CD19 binding molecule comprising:
[1930] (a) a first polypeptide whose amino acid sequence comprises the amino acid sequence of SEQ ID NO:1138;
[1931] (b) a second polypeptide whose amino acid sequence comprises the amino acid sequence of SEQ ID NO:1139; and
[1932] (c) a third polypeptide whose amino acid sequence comprises the amino acid sequence of SEQ ID NO:1110.

[1933] 777. A CD19 binding molecule comprising:
[1934] (a) a first polypeptide whose amino acid sequence comprises the amino acid sequence of SEQ ID NO:1140;
[1935] (b) a second polypeptide whose amino acid sequence comprises the amino acid sequence of SEQ ID NO:1141; and
[1936] (c) a third polypeptide whose amino acid sequence comprises the amino acid sequence of SEQ ID NO:1110.

[1937] 778. A CD19 binding molecule comprising:
[1938] (a) a first polypeptide whose amino acid sequence comprises the amino acid sequence of SEQ ID NO:1142;
[1939] (b) a second polypeptide whose amino acid sequence comprises the amino acid sequence of SEQ ID NO:1143; and
[1940] (c) a third polypeptide whose amino acid sequence comprises the amino acid sequence of SEQ ID NO:1110.

[1941] 779. A CD19 binding molecule comprising:
[1942] (a) a first polypeptide whose amino acid sequence comprises the amino acid sequence of SEQ ID NO:1077;
[1943] (b) a second polypeptide whose amino acid sequence comprises the amino acid sequence of SEQ ID NO:759; and
[1944] (c) a third polypeptide whose amino acid sequence comprises the amino acid sequence of SEQ ID NO:1078 or SEQ ID NO:1086.

[1945] 780. A CD19 binding molecule comprising:
[1946] (a) a first polypeptide whose amino acid sequence comprises the amino acid sequence of SEQ ID NO:1079;
[1947] (b) a second polypeptide whose amino acid sequence comprises the amino acid sequence of SEQ ID NO:759; and
[1948] (c) a third polypeptide whose amino acid sequence comprises the amino acid sequence of SEQ ID NO:1078 or SEQ ID NO:1086.

[1949] 781. A CD19 binding molecule comprising:
[1950] (a) a first polypeptide whose amino acid sequence comprises the amino acid sequence of SEQ ID NO:1077;
[1951] (b) a second polypeptide whose amino acid sequence comprises the amino acid sequence of SEQ ID NO:759; and
[1952] (c) a third polypeptide whose amino acid sequence comprises the amino acid sequence of SEQ ID NO:1086.

[1953] 782. A CD19 binding molecule comprising the sequences of a construct shown in Table 19-A1, 19A-2, 19-B, or 19C, preferably Table 19C.

[1954] 783. A CD19 binding molecule comprising:
[1955] (a) a first polypeptide whose amino acid sequence comprises the amino acid sequence of SEQ ID NO:1131;
[1956] (b) a second polypeptide whose amino acid sequence comprises the amino acid sequence of SEQ ID NO:1132; and
[1957] (c) a third polypeptide whose amino acid sequence comprises the amino acid sequence of SEQ ID NO:1133.

[1958] 784. A conjugate comprising (a) the CD19 binding molecule of any one of embodiments 1 to 783, and (b) an agent.

[1959] 785. The conjugate of embodiment 784, wherein the agent is a therapeutic agent, a diagnostic agent, a masking moiety, a cleavable moiety, a stabilizing agent, or any combination thereof.

[1960] 786. The conjugate of embodiment 784, wherein the agent is any of the agents described in Section 7.12.

[1961] 787. The conjugate of any one of embodiments 784 to 786, wherein the CD19-binding molecule is conjugated to a radionuclide.

[1962] 788. The conjugate of any one of embodiments 784 to 786, wherein the CD19-binding molecule is conjugated to an alkylating agent.

[1963] 789. The conjugate of any one of embodiments 784 to 786, wherein the CD19-binding molecule is conjugated to a topoisomerase inhibitor, which is optionally a topoisomerase I inhibitor or a topoisomerase II inhibitor.

[1964] 790. The conjugate of any one of embodiments 784 to 786, wherein the CD19-binding molecule is conjugated to a DNA damaging agent.

[1965] 791. The conjugate of any one of embodiments 784 to 786, wherein the CD19-binding molecule is conjugated to a DNA intercalating agent, optionally a groove binding agent such as a minor groove binding agent.

[1966] 792. The conjugate of any one of embodiments 784 to 786, wherein the CD19-binding molecule is conjugated to a RNA/DNA antimetabolite.

[1967] 793. The conjugate of any one of embodiments 784 to 786, wherein the CD19-binding molecule is conjugated to a kinase inhibitor.

[1968] 794. The conjugate of any one of embodiments 784 to 786, wherein the CD19-binding molecule is conjugated to a protein synthesis inhibitor.

[1969] 795. The conjugate of any one of embodiments 784 to 786, wherein the CD19-binding molecule is conjugated to a histone deacetylase (HDAC) inhibitor.

[1970] 796. The conjugate of any one of embodiments 784 to 786, wherein the CD19-binding molecule is conjugated to a mitochondrial inhibitor, which is optionally an inhibitor of a phosphoryl transfer reaction in mitochondria.

[1971] 797. The conjugate of any one of embodiments 784 to 786, wherein the CD19-binding molecule is conjugated to an antimitotic agent.

[1972] 798. The conjugate of any one of embodiments 784 to 786, wherein the CD19-binding molecule is conjugated to a maytansinoid.

[1973] 799. The conjugate of any one of embodiments 784 to 786, wherein the CD19-binding molecule is conjugated to a kinesin inhibitor.

[1974] 800. The conjugate of any one of embodiments 784 to 786, wherein the CD19-binding molecule is conjugated to a kinesin-like protein KIF11 inhibitor.

[1975] 801. The conjugate of any one of embodiments 784 to 786, wherein the CD19-binding molecule is conjugated to a V-ATPase (vacuolar-type H+-ATPase) inhibitor.

[1976] 802. The conjugate of any one of embodiments 784 to 786, wherein the CD19-binding molecule is conjugated to a pro-apoptotic agent.

[1977] 803. The conjugate of any one of embodiments 784 to 786, wherein the CD19-binding molecule is conjugated to a Bcl2 (B-cell lymphoma 2) inhibitor.

[1978] 804. The conjugate of any one of embodiments 784 to 786, wherein the CD19-binding molecule is conjugated to an MCL1 (myeloid cell leukemia 1) inhibitor.

[1979] 805. The conjugate of any one of embodiments 784 to 786, wherein the CD19-binding molecule is conjugated to a HSP90 (heat shock protein 90) inhibitor.

[1980] 806. The conjugate of any one of embodiments 784 to 786, wherein the CD19-binding molecule is conjugated to an IAP (inhibitor of apoptosis) inhibitor.

[1981] 807. The conjugate of any one of embodiments 784 to 786, wherein the CD19-binding molecule is conjugated to an mTOR (mechanistic target of rapamycin) inhibitor.

[1982] 808. The conjugate of any one of embodiments 784 to 786, wherein the CD19-binding molecule is conjugated to a microtubule stabilizer.

[1983] 809. The conjugate of any one of embodiments 784 to 786, wherein the CD19-binding molecule is conjugated to a microtubule destabilizer.

[1984] 810. The conjugate of any one of embodiments 784 to 786, wherein the CD19-binding molecule is conjugated to an auristatin.

[1985] 811. The conjugate of any one of embodiments 784 to 786, wherein the CD19-binding molecule is conjugated to a dolastatin.

[1986] 812. The conjugate of any one of embodiments 784 to 786, wherein the CD19-binding molecule is conjugated to a MetAP (methionine aminopeptidase).

[1987] 813. The conjugate of any one of embodiments 784 to 786, wherein the CD19-binding molecule is conjugated to a CRM1 (chromosomal maintenance 1) inhibitor.

[1988] 814. The conjugate of any one of embodiments 784 to 786, wherein the CD19-binding molecule is conjugated to a DPPIV (dipeptidyl peptidase IV) inhibitor.

[1989] 815. The conjugate of any one of embodiments 784 to 786, wherein the CD19-binding molecule is conjugated to a proteasome inhibitor.

[1990] 816. The conjugate of any one of embodiments 784 to 786, wherein the CD19-binding molecule is conjugated to a protein synthesis inhibitor.

[1991] 817. The conjugate of any one of embodiments 784 to 786, wherein the CD19-binding molecule is conjugated to a CDK2 (cyclin-dependent kinase 2) inhibitor.

[1992] 818. The conjugate of any one of embodiments 784 to 786, wherein the CD19-binding molecule is conjugated to a CDK9 (cyclin-dependent kinase 9) inhibitor.

[1993] 819. The conjugate of any one of embodiments 784 to 786, wherein the CD19-binding molecule is conjugated to a RNA polymerase inhibitor.

[1994] 820. The conjugate of any one of embodiments 784 to 786, wherein the CD19-binding molecule is conjugated to a DHFR (dihydrofolate reductase) inhibitor.

[1995] 821. The conjugate of any one of embodiments 784 to 820, wherein the agent is attached to the CD19 binding molecule with a linker, which is optionally a cleavable linker or a non-cleavable linker.

[1996] 822. The conjugate of any one of embodiments 784 to 821, which comprises an anti-CD19 binding molecule.

[1997] 823. A pharmaceutical composition comprising (a) the CD19 binding molecule of any one of embodiments 1 to 783 or the conjugate of any one of embodiments 784 to 822 and (b) an excipient.

[1998] 824. A method of treating a subject with a CD19-associated disease or disorder, comprising administering to the subject an effective amount of the CD19 binding molecule of any one of embodiments 1 to 783, the conjugate of any one of embodiments 784 to 822, or the pharmaceutical composition of embodiment 823.

[1999] 825. The method of embodiment 824, wherein the CD19-associated disease or disorder is cancer.

[2000] 826. The method of embodiment 824, wherein the disease or disorder is a plasma cell neoplasm.

[2001] 827. The method of embodiment 824, wherein the disease or disorder is a B cell malignancy that expresses cell surface CD19.

[2002] 828. The method of embodiment 824, wherein the disease or disorder is non-Hodgkin's lymphoma.

[2003] 829. The method of embodiment 824, wherein the disease or disorder is diffuse large B-cell lymphoma (DLBCL).

[2004] 830. The method of embodiment 829, wherein the DLBCL is relapsed or refractory DLBCL.

[2005] 831. The method of embodiment 824, wherein the disease or disorder is Burkitt's lymphoma.

[2006] 832. The method of embodiment 824, wherein the CD19-associated disease or disorder is a B cell malignancy.

[2007] 833. The method of embodiment 832, wherein the B cell malignancy is a hematological cancer.

[2008] 834. The method of embodiment 832, wherein the B cell malignancy is a malignant lymphoproliferative condition 835. The method of embodiment 832, wherein the B cell malignancy is a plasma cell dyscrasia.

[2009] 836. The method of embodiment 832, wherein the B cell malignancy is an acute leukemia.

[2010] 837. The method of embodiment 832, wherein the B cell malignancy is B cell acute lymphocytic leukemia (B-ALL).

[2011] 838. The method of embodiment 832, wherein the B cell malignancy is relapsed and/or refractory B cell acute lymphocytic leukemia (B-ALL).

[2012] 839. The method of embodiment 832, wherein the B cell malignancy is a non-Hodgkin's lymphoma (NHL).

[2013] 840. The method of embodiment 832, wherein the B cell malignancy is a relapsed and/or refractory non-Hodgkin's lymphoma (NHL).

[2014] 841. The method of embodiment 832, wherein the B cell malignancy is chronic lymphocytic leukemia (CLL)/small lymphocytic lymphoma (SLL).

[2015] 842. The method of embodiment 832, wherein the B cell malignancy is relapsed and/or refractory chronic lymphocytic leukemia (CLL)/small lymphocytic lymphoma (SLL).

[2016] 843. The method of embodiment 832, wherein the B cell malignancy is follicular lymphoma (FL), optionally wherein the FL is small cell FL or large cell FL.

[2017] 844. The method of embodiment 832, wherein the B cell malignancy is relapsed and/or refractory follicular lymphoma (FL), optionally wherein the FL is small cell FL or large cell FL.

[2018] 845. The method of embodiment 832, wherein the B cell malignancy is mantle cell lymphoma (MCL).

[2019] 846. The method of embodiment 832, wherein the B cell malignancy is relapsed and/or refractory mantle cell lymphoma (MCL).

[2020] 847. The method of embodiment 832, wherein the B cell malignancy is diffuse large B-cell lymphoma (DLBCL).

[2021] 848. The method of embodiment 832, wherein the B cell malignancy is relapsed and/or refractory diffuse large B-cell lymphoma (DLBCL).

[2022] 849. The method of embodiment 832, wherein the B cell malignancy is Burkitt lymphoma.

[2023] 850. The method of embodiment 832, wherein the B cell malignancy is lymphoplasmacytic lymphoma (Waldenstrom macroglobulinemia).

[2024] 851. The method of embodiment 832, wherein the B cell malignancy is MALT lymphoma (mucosa-associated lymphoid tissue lymphoma).

[2025] 852. The method of embodiment 832, wherein the B cell malignancy is marginal zone lymphoma (MZL).

[2026] 853. The method of embodiment 832, wherein the B cell malignancy is extranodal marginal zone lymphoma (EMZL).

[2027] 854. The method of embodiment 832, wherein the B cell malignancy is nodal marginal zone B-cell lymphoma (NZML).

[2028] 855. The method of embodiment 832, wherein the B cell malignancy is splenic marginal zone B-cell lymphoma (SMZL).

[2029] 856. The method of any one of embodiments 839 to 855, wherein the subject has failed at least one prior line of standard of care therapy.

[2030] 857. The method of embodiment 856, wherein the subject has failed up to five prior lines of standard of care therapies.

[2031] 858. The method of embodiment 856 or embodiment 857, wherein the subject has failed one prior line of standard of care therapy.

[2032] 859. The method of embodiment 856 or embodiment 857, wherein the subject has failed two prior lines of standard of care therapy.

[2033] 860. The method of embodiment 856 or embodiment 857, wherein the subject has failed three prior lines of standard of care therapy.

[2034] 861. The method of embodiment 856 or embodiment 857, wherein the subject has failed four prior lines of standard of care therapy.

[2035] 862. The method of embodiment 856 or embodiment 857, wherein the subject has failed five prior lines of standard of care therapy.

[2036] 863. The method of any one of embodiments 856 to 862, wherein the at least one prior line of standard of care therapies comprise an anti-CD20 therapy.

[2037] 864. The method of embodiment 863, wherein the anti-CD20 therapy is rituximab.

[2038] 865. The method of any one of embodiments 856 to 864, wherein the subject is intolerant to or ineligible for one or more other approved therapies.

[2039] 866. The method of embodiment 865, wherein the one or more other approved therapies comprise an autologous stem cell transplant (ASCT).

[2040] 867. The method of any one of embodiments 856 to 866, wherein the subject is a non-responder to a CAR composition.

[2041] 868. The method of embodiment 867, wherein the CAR composition is an anti-CD19 CAR composition.

[2042] 869. The method of embodiment 867 or embodiment 868, wherein the CAR composition comprises CTL019, tisagenlecleucel, axicabtagene ciloleucel, brexucabtagene autoleucel or lisocabtagene maraleucel.

[2043] 870. The method of embodiment 832, wherein the B cell malignancy is a Hodgkin's lymphoma.

[2044] 871. The method of embodiment 832, wherein the B cell malignancy is multiple myeloma.

[2045] 872. The method of embodiment 832, wherein the B cell malignancy is hairy cell leukemia.

[2046] 873. The method of embodiment 832, wherein the B cell malignancy is primary effusion lymphoma.

[2047] 874. The method of embodiment 832, wherein the B cell malignancy is B cell prolymphocytic leukemia.

[2048] 875. The method of embodiment 832, wherein the B cell malignancy is plasmablastic lymphoma.

[2049] 876. The method of embodiment 832, wherein the B cell malignancy is follicle center lymphoma.

[2050] 877. The method of embodiment 832, wherein the B cell malignancy is precursor B-lymphoblastic leukemia.

[2051] 878. The method of embodiment 832, wherein the B cell malignancy is high-grade B-cell lymphoma.

[2052] 879. The method of embodiment 832, wherein the B cell malignancy is primary mediastinal large B-cell lymphoma.

[2053] 880. The method of embodiment 824, wherein the CD19-associated disease or disorder is an autoimmune or inflammatory disorder.

[2054] 881. The method of any of embodiments 824 to 880, further comprising administering at least one further agent to the subject.

[2055] 882. The method of embodiment 881, wherein the at least one further agent comprises an immunomodulatory imide drug (IMiD).

[2056] 883. The method of embodiment 882, wherein the immunomodulatory imide drug (IMiD) is lenalidomide, thalidomide, pomalidomide, or iberdomide.

[2057] 3%

[2058] 884. The method of embodiment 883, wherein the immunomodulatory imide drug (IMiD) is lenalidomide.

[2059] 885. A nucleic acid or plurality of nucleic acids encoding the CD19-binding molecule of any one of embodiments 1 to 783.

[2060] 886. The nucleic acid or plurality of nucleic acids of embodiment 885 which is a DNA (are DNAs).

[2061] 887. The nucleic acid or plurality of nucleic acids of embodiment 886 which are in the form of one or more vectors, optionally expression vectors.

[2062] 888. The nucleic acid or plurality of nucleic acids of embodiment 885 which is a mRNA (are mRNAs).

[2063] 889. A cell engineered to express the CD19 binding molecule of any one embodiments 1 to 783.

[2064] 890. A cell transfected with one or more expression vectors comprising one or more nucleic acid sequences encoding the CD19 binding molecule of any one embodiments 1 to 783 under the control of one or more promoters.

[2065] 891. The cell of embodiment 889 or embodiment 890, wherein expression of the CD19 binding molecule is under the control of an inducible promoter.

[2066] 892. The cell of any one of embodiments 889 to 891, wherein the CD19 binding molecule is produced in secretable form.

[2067] 893. A method of producing a CD19 binding molecule, comprising:
[2068] (a) culturing the cell of any one of embodiments 889 to 892 in conditions under which the CD19 binding molecule is expressed; and
[2069] (b) recovering the CD19-binding molecule from the cell culture.

### 10. INCORPORATION BY REFERENCE

[2070] All publications, patents, patent applications and other documents cited in this application are hereby incorporated by reference in their entireties for all purposes to the same extent as if each individual publication, patent, patent application or other document were individually indicated to be incorporated by reference for all purposes. In the event that there are any inconsistencies between the teachings of one or more of the references incorporated herein and the present disclosure, the teachings of the present specification are intended.

What is claimed is:

1. A CD19 binding molecule that specifically binds to human CD19 and comprises
(a) CDR-H1, CDR-H2, and CDR-H3 having the amino acid sequences of SEQ ID NO:1, SEQ ID NO:2, and SEQ ID NO:3, and CDR-L1, CDR-L2, and CDR-L3 having the amino acid sequences of SEQ ID NO:14, SEQ ID NO:15, and SEQ ID NO:16; and
(b) a first variant human IgG1 Fc region and a second variant human IgG1 Fc region forming a Fc domain, wherein the first and second variant Fc regions comprise L234A, L235A, and G237A (“LALAGA”) substitutions, L234A, L235A, S267K, and P329A (“LALASKPA”) substitutions, D265A, P329A, and S267K (“DAPASK”) substitutions, G237A, D265A, and P329A (“GADAPA”) substitutions, G237A, D265A, P329A, and S267K (“GADAPASK”) substitutions, L234A, L235A, and P329G (“LALAPG”) substitutions, or L234A, L235A, and P329A (“LALAPA”) substitutions, wherein the amino acid residues are numbered according to the EU numbering system.

2. A CD19 binding molecule that specifically binds to human CD19 and comprises
(a) CDR-H1, CDR-H2, and CDR-H3 having the amino acid sequences of SEQ ID NO:4, SEQ ID NO:5, and SEQ ID NO:6, and CDR-L1, CDR-L2, and CDR-L3 having the amino acid sequences of SEQ ID NO:17, SEQ ID NO:18, and SEQ ID NO:19; and
(b) a first variant human IgG1 Fc region and a second variant human IgG1 Fc region forming a Fc domain, wherein the first and second variant Fc regions comprise L234A, L235A, and G237A (“LALAGA”) substitutions, L234A, L235A, S267K, and P329A (“LALASKPA”) substitutions, D265A, P329A, and S267K (“DAPASK”) substitutions, G237A, D265A, and P329A (“GADAPA”) substitutions, G237A, D265A, P329A, and S267K (“GADAPASK”) substitutions, L234A, L235A, and P329G (“LALAPG”) substitutions, or L234A, L235A, and P329A (“LALAPA”) substitutions, wherein the amino acid residues are numbered according to the EU numbering system.

3. A CD19 binding molecule that specifically binds to human CD19 and comprises
(a) CDR-H1, CDR-H2, and CDR-H3 having the amino acid sequences of SEQ ID NO:7, SEQ ID NO:8, and SEQ ID NO:9, and CDR-L1, CDR-L2, and CDR-L3 having the amino acid sequences of SEQ ID NO:20, SEQ ID NO:21, and SEQ ID NO:22; and
(b) a first variant human IgG1 Fc region and a second variant human IgG1 Fc region forming a Fc domain, wherein the first and second variant Fc regions comprise L234A, L235A, and G237A (“LALAGA”) substitutions, L234A, L235A, S267K, and P329A (“LALASKPA”) substitutions, D265A, P329A, and S267K (“DAPASK”) substitutions, G237A, D265A, and P329A (“GADAPA”) substitutions, G237A, D265A, P329A, and S267K (“GADAPASK”) substitutions, L234A, L235A, and P329G (“LALAPG”) substitutions, or L234A, L235A, and P329A (“LALAPA”) substitutions, wherein the amino acid residues are numbered according to the EU numbering system.

4. A CD19 binding molecule that specifically binds to human CD19 and comprises
(a) CDR-H1, CDR-H2, and CDR-H3 having the amino acid sequences of SEQ ID NO:10, SEQ ID NO:11, and SEQ ID NO:12, and CDR-L1, CDR-L2, and CDR-L3 having the amino acid sequences of SEQ ID NO:23, SEQ ID NO:24, and SEQ ID NO:25; and
(b) a first variant human IgG1 Fc region and a second variant human IgG1 Fc region forming a Fc domain, wherein the first and second variant Fc regions comprise L234A, L235A, and G237A (“LALAGA”) substitutions, L234A, L235A, S267K, and P329A (“LALASKPA”) substitutions, D265A, P329A, and S267K (“DAPASK”) substitutions, G237A, D265A, and P329A (“GADAPA”) substitutions, G237A, D265A, P329A, and S267K (“GADAPASK”) substitutions, L234A, L235A, and P329G (“LALAPG”) substitutions, or L234A, L235A, and P329A (“LALAPA”) substitutions, wherein the amino acid residues are numbered according to the EU numbering system.

5. The CD19 binding molecule of any one of claims 1 to 4, which comprises a VH having the amino acid sequence of SEQ ID NO:13.

6. The CD19 binding molecule of any one of claims 1 to 5, which comprises a VL having the amino acid sequence of SEQ ID NO:26.

7. A CD19 binding molecule that specifically binds to human CD19 and comprises
(a) CDR-H1, CDR-H2, and CDR-H3 having the amino acid sequences of SEQ ID NO:27, SEQ ID NO:28, and SEQ ID NO:29, and CDR-L1, CDR-L2, and CDR-L3 having the amino acid sequences of SEQ ID NO:40, SEQ ID NO:41, and SEQ ID NO:42; and
(b) a first variant human IgG1 Fc region and a second variant human IgG1 Fc region forming a Fc domain, wherein the first and second variant Fc regions comprise L234A, L235A, and G237A (“LALAGA”) substitutions, L234A, L235A, S267K, and P329A (“LALASKPA”) substitutions, D265A, P329A, and S267K (“DAPASK”) substitutions, G237A, D265A, and P329A (“GADAPA”) substitutions, G237A, D265A, P329A, and S267K (“GADAPASK”) substitutions, L234A, L235A, and P329G (“LALAPG”) substitutions, or L234A, L235A, and P329A (“LALAPA”) substitutions, wherein the amino acid residues are numbered according to the EU numbering system.

8. A CD19 binding molecule that specifically binds to human CD19 and comprises
(a) CDR-H1, CDR-H2, and CDR-H3 having the amino acid sequences of SEQ ID NO:30, SEQ ID NO:31, and SEQ ID NO:32, and CDR-L1, CDR-L2, and CDR-L3 having the amino acid sequences of SEQ ID NO:43, SEQ ID NO:44, and SEQ ID NO:45; and
(b) a first variant human IgG1 Fc region and a second variant human IgG1 Fc region forming a Fc domain, wherein the first and second variant Fc regions comprise L234A, L235A, and G237A (“LALAGA”) substitutions, L234A, L235A, S267K, and P329A (“LALASKPA”) substitutions, D265A, P329A, and S267K (“DAPASK”) substitutions, G237A, D265A, and P329A (“GADAPA”) substitutions, G237A, D265A, P329A, and S267K (“GADAPASK”) substitutions, L234A, L235A, and P329G (“LALAPG”) substitutions, or L234A, L235A, and P329A (“LALAPA”) substitutions, wherein the amino acid residues are numbered according to the EU numbering system.

9. A CD19 binding molecule that specifically binds to human CD19 and comprises
(a) CDR-H1, CDR-H2, and CDR-H3 having the amino acid sequences of SEQ ID NO:33, SEQ ID NO:34, and SEQ ID NO:35, and CDR-L1, CDR-L2, and CDR-L3 having the amino acid sequences of SEQ ID NO:46, SEQ ID NO:47, and SEQ ID NO:48; and
(b) a first variant human IgG1 Fc region and a second variant human IgG1 Fc region forming a Fc domain, wherein the first and second variant Fc regions comprise L234A, L235A, and G237A (“LALAGA”) substitutions, L234A, L235A, S267K, and P329A (“LALASKPA”) substitutions, D265A, P329A, and S267K (“DAPASK”) substitutions, G237A, D265A, and P329A (“GADAPA”) substitutions, G237A, D265A, P329A, and S267K (“GADAPASK”) substitutions, L234A, L235A, and P329G (“LALAPG”) substitutions, or L234A, L235A, and P329A (“LALAPA”) substitutions, wherein the amino acid residues are numbered according to the EU numbering system.

10. A CD19 binding molecule that specifically binds to human CD19 and comprises
(a) CDR-H1, CDR-H2, and CDR-H3 having the amino acid sequences of SEQ ID NO:36, SEQ ID NO:37, and SEQ ID NO:38, and CDR-L1, CDR-L2, and CDR-L3 having the amino acid sequences of SEQ ID NO:49, SEQ ID NO:50, and SEQ ID NO:51; and
(b) a first variant human IgG1 Fc region and a second variant human IgG1 Fc region forming a Fc domain, wherein the first and second variant Fc regions comprise L234A, L235A, and G237A (“LALAGA”) substitutions, L234A, L235A, S267K, and P329A (“LALASKPA”) substitutions, D265A, P329A, and S267K (“DAPASK”) substitutions, G237A, D265A, and P329A (“GADAPA”) substitutions, G237A, D265A, P329A, and S267K (“GADAPASK”) substitutions, L234A, L235A, and P329G (“LALAPG”) substitutions, or L234A, L235A, and P329A (“LALAPA”) substitutions, wherein the amino acid residues are numbered according to the EU numbering system.

11. The CD19 binding molecule of any one of claims 7 to 10, which comprises a VH having the amino acid sequence of SEQ ID NO:39.

12. The CD19 binding molecule of any one of claims 7 to 11, which comprises a VL having the amino acid sequence of SEQ ID NO:52.

13. The CD19 binding molecule of any one of claims 1 to 12, which is a multispecific binding molecule (MBM) comprising:
(a) an antigen-binding module 1 (ABM1) that binds specifically to CD19; and
(b) an antigen-binding module 2 (ABM2) that binds specifically to a different target molecule, optionally wherein the target molecule is a component of a human T-cell receptor (TCR) complex.

14. The CD19 binding molecule of claim 13, in which ABM2 binds specifically to a component of a human T-cell receptor (TCR) complex.

15. The CD19 binding molecule of claim 13, which is a bispecific binding molecule (BBM).

16. The CD19 binding molecule of claim 15, in which ABM2 binds specifically to a component of a human T-cell receptor (TCR) complex.

17. The CD19 binding molecule of claim 15 or claim 16, which is bivalent.

18. The CD19 binding molecule of claim 15 or claim 16, which is trivalent.

19. The CD19 binding molecule of claim 18, which has the configuration referred to as T1 in Section 7.5.2.

20. The CD19 binding molecule of claim 18, which has the configuration referred to as T2 in Section 7.5.2.

21. The CD19 binding molecule of claim 18, which has the configuration referred to as T3 in Section 7.5.2.

22. The CD19 binding molecule of claim 18, which has the configuration referred to as T4 in Section 7.5.2.

23. The CD19 binding molecule of claim 18, which has the configuration referred to as T5 in Section 7.5.2.

24. The CD19 binding molecule of claim 18, which has the configuration referred to as T6 in Section 7.5.2.

25. The CD19 binding molecule of claim 15 or claim 16, which is tetravalent.

26. The CD19 binding molecule of claim 25, which has the configuration referred to as Tv1 in Section 7.5.3.

27. The CD19 binding molecule of claim 25, which has the configuration referred to as Tv2 in Section 7.5.3.

28. The CD19 binding molecule of claim 25, which has the configuration referred to as Tv3 in Section 7.5.3.

29. The CD19 binding molecule of claim 25, which has the configuration referred to as Tv4 in Section 7.5.3.

30. The CD19 binding molecule of claim 25, which has the configuration referred to as Tv5 in Section 7.5.3.

31. The CD19 binding molecule of claim 25, which has the configuration referred to as Tv6 in Section 7.5.3.

32. The CD19 binding molecule of claim 25, which has the configuration referred to as Tv7 in Section 7.5.3.

33. The CD19 binding molecule of claim 25, which has the configuration referred to as Tv8 in Section 7.5.3.

34. The CD19 binding molecule of claim 25, which has the configuration referred to as Tv9 in Section 7.5.3.

35. The CD19 binding molecule of claim 25, which has the configuration referred to as Tv10 in Section 7.5.3.

36. The CD19 binding molecule of claim 25, which has the configuration referred to as Tv1 in Section 7.5.3.

37. The CD19 binding molecule of claim 25, which has the configuration referred to as Tv12 in Section 7.5.3.

38. The CD19 binding molecule of claim 25, which has the configuration referred to as Tv13 in Section 7.5.3.

39. The CD19 binding molecule of claim 25, which has the configuration referred to as Tv14 in Section 7.5.3.

40. The CD19 binding molecule of claim 13, which is a trispecific binding molecule (TBM) comprising an antigen-binding module 3 (ABM3) that binds specifically to a target molecule other than CD19.

41. The CD19 binding molecule of claim 40, in which ABM2 binds specifically to a component of a human T-cell receptor (TCR) complex and ABM3 binds specifically to (i) human CD2 or (ii) a tumor associated antigen (TAA).

42. The CD19 binding molecule of claim 40 or claim 41, which is trivalent.

43. The CD19 binding molecule of claim 42, which has the configuration referred to as T1 in Section 7.6.1.

44. The CD19 binding molecule of claim 42, which has the configuration referred to as T2 in Section 7.6.1.

45. The CD19 binding molecule of claim 42, which has the configuration referred to as T3 in Section 7.6.1.

46. The CD19 binding molecule of claim 42, which has the configuration referred to as T4 in Section 7.6.1.

47. The CD19 binding molecule of claim 42, which has the configuration referred to as T5 in Section 7.6.1.

48. The CD19 binding molecule of claim 42, which has the configuration referred to as T6 in Section 7.6.1.

49. The CD19 binding molecule of claim 40 or claim 41, which is tetravalent.

50. The CD19 binding molecule of claim 40 or claim 41, which is pentavalent.

51. The CD19 binding molecule of claim 40 or claim 41, which is hexavalent.

52. The CD19 binding molecule of any one of claims 13 to 51, in which ABM1 is capable of binding CD19 at the same time as ABM2 is bound to its target molecule.

53. The CD19 binding molecule of claim 52, in which ABM1 is capable of binding CD19 at the same time ABM3, if present, is bound to its target molecule.

54. The CD19 binding molecule of any one of claims 13 to 53, wherein ABM1 is an antibody, an antibody fragment, an scFv, a dsFv, a Fv, a Fab, an scFab, a (Fab′)2, a single domain antibody (SDAB), a VH or VL domain, or a camelid VHH domain.

55. The CD19 binding molecule of claim 54, wherein ABM1 is an scFv.

56. The CD19 binding molecule of claim 54, wherein ABM1 is a Fab.

57. The CD19 binding molecule of claim 54, wherein the Fab is a Fab heterodimer.

58. The CD19 binding molecule of claim 54, wherein ABM1 is an anti-CD19 antibody or an antigen-binding domain thereof.

59. The CD19 binding molecule of any one of claims 13 to 58, wherein ABM2 is an antibody, an antibody fragment, an scFv, a dsFv, a Fv, a Fab, an scFab, a (Fab′)2, a single domain antibody (SDAB), a VH or VL domain, or a camelid VHH domain.

60. The CD19 binding molecule of claim 59, wherein ABM2 is an scFv.

61. The CD19 binding molecule of claim 59, wherein ABM2 is a Fab.

62. The CD19 binding molecule of any one of claims 13 to 61, wherein the component of the TCR complex is CD3.

63. The CD19 binding molecule of claim 62, wherein ABM2 is an anti-CD3 antibody or an antigen-binding domain thereof.

64. The CD19 binding molecule of claim 63, wherein ABM2 comprises the CDR sequences of any of CD3-1 to CD3-130.

65. The CD19 binding molecule of any one of claims 13 to 61, wherein the component of the TCR complex is TCR-a, TCR-s, or a TCR-a/s dimer.

66. The CD19-binding molecule of claim 65, wherein ABM2 is an antibody or an antigen-binding domain thereof.

67. The CD19-binding molecule of claim 65, wherein ABM2 is a Fab.

68. The CD19 binding molecule of any one of claims 40 to 51 and claims 52 to 67 to the extent dependent from claims 40 to 51, in which ABM3 binds specifically to human CD2.

69. The CD19-binding molecule of claim 68, wherein ABM3 is a CD58 moiety.

70. The CD19-binding molecule of claim 69, wherein the CD58 moiety comprises the amino acid sequence of CD58-1 as set forth in Table 15.

71. The CD19-binding molecule of claim 69, wherein the CD58 moiety comprises the amino acid sequence of CD58-2 as set forth in Table 15.

72. The CD19-binding molecule of claim 69, wherein the CD58 moiety comprises the amino acid sequence of CD58-3 as set forth in Table 15.

73. The CD19-binding molecule of claim 69, wherein the CD58 moiety comprises the amino acid sequence of CD58-4 as set forth in Table 15.

74. The CD19-binding molecule of claim 69, wherein the CD58 moiety comprises the amino acid sequence of CD58-5 as set forth in Table 15.

75. The CD19-binding molecule of claim 69, wherein the CD58 moiety comprises the amino acid sequence of CD58-6 as set forth in Table 15.

76. The CD19-binding molecule of claim 69, wherein the CD58 moiety comprises the amino acid sequence of CD58-7 as set forth in Table 15.

77. The CD19-binding molecule of claim 69, wherein the CD58 moiety comprises the amino acid sequence of CD58-8 as set forth in Table 15.

78. The CD19-binding molecule of claim 69, wherein the CD58 moiety comprises the amino acid sequence of CD58-9 as set forth in Table 15.

79. The CD19-binding molecule of claim 69, wherein the CD58 moiety comprises the amino acid sequence of CD58-10 as set forth in Table 15.

80. The CD19-binding molecule of claim 69, wherein the CD58 moiety comprises the amino acid sequence of CD58-11 as set forth in Table 15.

81. The CD19-binding molecule of claim 69, wherein the CD58 moiety comprises the amino acid sequence of CD58-12 as set forth in Table 15.

82. The CD19-binding molecule of claim 68, wherein ABM3 is an anti-CD2 antibody or an antigen-binding domain thereof.

83. The CD19 binding molecule of any one of claims 40 to 51 and claims 52 to 67 to the extent dependent from claims 40 to 51, in which ABM3 binds specifically to a human TAA.

84. The CD19 binding molecule of claim 83, wherein the TAA is a TAA expressed on cancerous B cells that are B cell-derived plasma cells.

85. The CD19 binding molecule of claim 83 or claim 84, wherein the TAA is a TAA expressed on cancerous B cells that are not plasma cells.

86. The CD19 binding molecule of any one of claims 83 to 85, wherein the TAA is selected from BCMA, CD20, CD22, CD123, CD33, CLL1, CD138, CS1, CD38, CD133, FLT3, CD52, TNFRSF13C, TNFRSF13B, CXCR4, PD-L1, LY9, CD200, FCGR2B, CD21, CD23, CD24, CD40L, CD72, CD79a, and CD79b.

87. The CD19 binding molecule of claim 86, wherein ABM3 comprises a binding sequence set forth in Table 16 or Table 17.

88. The CD19 binding molecule of claim 87, which has the heavy and/or light chain variable regions of any one of BCMA-1 to BCMA-40 as set forth in Table 17A.

89. The CD19 binding molecule of claim 87, which has the heavy and/or light chain CDR sequences (as defined by Kabat) of any one of BCMA-1 to BCMA-40 as set forth in Tables 17B and 17E.

90. The CD19 binding molecule of claim 87, which has the heavy and/or light chain CDR sequences (as defined by Chothia) of any one of BCMA-1 to BCMA-40 as set forth in Tables 17C and 17F.

91. The CD19 binding molecule of claim 87, which has the heavy and/or light chain CDR sequences (as defined by a combination of Kabat and Chothia sequences) of any one of BCMA-1 to BCMA-40 as set forth in Tables 17D and 17G.

92. A CD19 binding molecule which is trispecific binding molecule (TBM) comprising:
(a) an antigen-binding module 1 (ABM1) that binds specifically to CD19 and comprises CDR-H1, CDR-H2, and CDR-H3 having the amino acid sequences of SEQ ID NO:4, SEQ ID NO:5, and SEQ ID NO:6, and CDR-L1, CDR-L2, and CDR-L3 having the amino acid sequences of SEQ ID NO:17, SEQ ID NO:18, and SEQ ID NO:19;
(b) an antigen-binding module 2 (ABM2) that binds specifically to a component of a human T-cell receptor (TCR) complex;
(c) an antigen-binding module 3 (ABM3) that binds specifically to human CD2; and
(d) a first variant human IgG1 Fc region and a second variant human IgG1 Fc region forming a Fc domain, wherein the first and second variant Fc regions comprise L234A, L235A, and G237A (“LALAGA”) substitutions, L234A, L235A, S267K, and P329A (“LALASKPA”) substitutions, D265A, P329A, and S267K (“DAPASK”) substitutions, G237A, D265A, and P329A (“GADAPA”) substitutions, G237A, D265A, P329A, and S267K (“GADAPASK”) substitutions, L234A, L235A, and P329G (“LALAPG”) substitutions, or L234A, L235A, and P329A (“LALAPA”) substitutions, wherein the amino acid residues are numbered according to the EU numbering system.

93. The CD19 binding molecule of claim 92 which is trivalent.

94. The CD19 binding molecule of claim 92 or claim 93, in which ABM1 is a Fab.

95. The CD19 binding molecule of any one of claims 92 to 94, in which the Fab comprises a VH having the amino acid sequence of SEQ ID NO:13 and a VL having the amino acid sequence of SEQ ID NO:26.

96. The CD19 binding molecule of any one of claims 92 to 95, wherein the component of the TCR complex is CD3.

97. The CD19 binding molecule of claim 96, wherein ABM2 is an anti-CD3 antibody or an antigen-binding domain thereof.

98. The CD19 binding molecule of claim 97, wherein ABM2 comprises the CDR sequences of CD3-21.

99. The CD19 binding molecule of claim 97 or claim 98, wherein ABM2 comprises the heavy and light chain variable sequences of CD3-21, as set forth in Table 12A.

100. The CD19 binding molecule of any one of claims 97 to 99, wherein the anti-CD3 antibody or antigen-binding domain thereof is in the form of a scFv.

101. The CD19 binding molecule of claim 100, wherein ABM2 comprises the amino acid sequence of the scFv designated as CD3-21 in Table 12A.

102. The CD19 binding molecule of any one of claims 92 to 101, wherein ABM3 is a CD58 moiety.

103. The CD19 binding molecule of any one of claims 92 to 102, wherein ABM3 comprises the amino acid sequence of CD58-6 as set forth in Table 15.

104. A CD19 binding molecule which is a trispecific binding molecule (TBM) comprising:
(a) an antigen-binding module 1 (ABM1) that binds specifically to CD19 and which is a Fab comprising: (i) CDR-H1, CDR-H2, and CDR-H3 having the amino acid sequences of SEQ ID NO:4, SEQ ID NO:5, and SEQ ID NO:6, and CDR-11, CDR-L2, and CDR-L3 having the amino acid sequences of SEQ ID NO:17, SEQ ID NO:18, and SEQ ID NO:19; or (ii) CDR-H1, CDR-H2, and CDR-H3 having the amino acid sequences of SEQ ID NO:30, SEQ ID NO:31, and SEQ ID NO:32, and CDR-L1, CDR-L2, and CDR-L3 having the amino acid sequences of SEQ ID NO:43, SEQ ID NO:4, and SEQ ID NO:45;
(b) an antigen-binding module 2 (ABM2) that binds specifically to CD3 and which comprises the amino acid sequence of the scFv designated as CD3-21 in Table 12A;
(c) an antigen-binding module 3 (ABM3) that binds specifically to human CD2 and which comprises the amino acid sequence of CD58-6 as set forth in Table 15; and
(d) a first variant human IgG1 Fc region and a second variant human IgG1 Fc region forming a Fc domain, wherein the first and second variant Fc regions comprise L234A, L235A, and G237A (“LALAGA”) substitutions, L234A, L235A, S267K, and P329A (“LALASKPA”) substitutions, D265A, P329A, and S267K (“DAPASK”) substitutions, G237A, D265A, and P329A (“GADAPA”) substitutions, G237A, D265A, P329A, and S267K (“GADAPASK”) substitutions, L234A, L235A, and P329G (“LALAPG”) substitutions, or L234A, L235A, and P329A (“LALAPA”) substitutions, wherein the amino acid residues are numbered according to the EU numbering system.

105. A CD19 binding molecule which is a trispecific binding molecule (TBM) comprising:
(a) an antigen-binding module 1 (ABM1) that binds specifically to CD19 and which is a Fab comprising: (i) CDR-H1, CDR-H2, and CDR-H3 having the amino acid sequences of SEQ ID NO:4, SEQ ID NO:5, and SEQ ID NO:6, and CDR-L1, CDR-L2, and CDR-L3 having the amino acid sequences of SEQ ID NO:17, SEQ ID NO:18, and SEQ ID NO:19; or (ii) CDR-H1, CDR-H2, and CDR-H3 having the amino acid sequences of SEQ ID NO:30, SEQ ID NO:31, and SEQ ID NO:32, and CDR-L1, CDR-L2, and CDR-L3 having the amino acid sequences of SEQ ID NO:43, SEQ ID NO:4, and SEQ ID NO:45;
(b) an antigen-binding module 2 (ABM2) that binds specifically to CD3 and which comprises the amino acid sequence of the scFv designated as CD3-129 in Table 12A;
(c) an antigen-binding module 3 (ABM3) that binds specifically to human CD2 and which comprises the amino acid sequence of CD58-6 as set forth in Table 15; and
(d) a first variant human IgG1 Fc region and a second variant human IgG1 Fc region forming a Fc domain, wherein the first and second variant Fc regions comprise L234A, L235A, and G237A (“LALAGA”) substitutions, L234A, L235A, S267K, and P329A (“LALASKPA”) substitutions, D265A, P329A, and S267K (“DAPASK”) substitutions, G237A, D265A, and P329A (“GADAPA”) substitutions, G237A, D265A, P329A, and S267K (“GADAPASK”) substitutions, L234A, L235A, and P329G (“LALAPG”) substitutions, or L234A, L235A, and P329A (“LALAPA”) substitutions, wherein the amino acid residues are numbered according to the EU numbering system.

106. The CD19 binding molecule of claim 104 or claim 105, wherein ABM1 comprises CDR-H1, CDR-H2, and CDR-H3 having the amino acid sequences of SEQ ID NO:4, SEQ ID NO:5, and SEQ ID NO:6, and CDR-L1, CDR-L2, and CDR-L3 having the amino acid sequences of SEQ ID NO:17, SEQ ID NO:18, and SEQ ID NO:19.

107. The CD19 binding molecule of any one of claims 104 to 106, wherein ABM1 comprises a VH having the amino acid sequence of SEQ ID NO:13 and a VL having the amino acid sequence of SEQ ID NO:26.

108. The CD19 binding molecule of any one of claim 92 to 107, wherein the CD19 binding molecule has the configuration depicted in FIG. 2I and referred to as T2 in Section 7.6.1.

109. The CD19 binding molecule of any one of claims 1 to 108, wherein the first variant Fc region and the second variant Fc region comprise L234A, L235A, and G237A (“LALAGA”) substitutions, wherein the amino acid residues are numbered according to the EU numbering system.

110. The CD19 binding molecule of any one of claims 1 to 108, wherein the first variant Fc region and the second variant Fc region comprise L234A, L235A, S267K, and P329A (“LALASKPA”) substitutions, wherein the amino acid residues are numbered according to the EU numbering system.

111. The CD19 binding molecule of any one of claims 1 to 108, wherein the first variant Fc region and the second variant Fc region comprise D265A, P329A, and S267K (“DAPASK”) substitutions, wherein the amino acid residues are numbered according to the EU numbering system.

112. The CD19 binding molecule of any one of claims 1 to 108, wherein the first variant Fc region and the second variant Fc region comprise G237A, D265A, and P329A (“GADAPA”) substitutions, wherein the amino acid residues are numbered according to the EU numbering system.

113. The CD19 binding molecule of any one of claims 1 to 108, wherein the first variant Fc region and the second variant Fc region comprise G237A, D265A, P329A, and S267K (“GADAPASK”) substitutions, wherein the amino acid residues are numbered according to the EU numbering system.

114. The CD19 binding molecule of any one of claims 1 to 108, wherein the first variant Fc region and the second variant Fc region comprise L234A, L235A, and P329G (“LALAPG”) substitutions, wherein the amino acid residues are numbered according to the EU numbering system.

115. The CD19 binding molecule of any one of claims 1 to 108, wherein the first variant Fc region and the second variant Fc region comprise L234A, L235A, and P329A (“LALAPA”) substitutions, wherein the amino acid residues are numbered according to the EU numbering system.

116. The CD19 binding molecule of any one of claims 1 to 108, wherein the first variant Fc region and/or the second variant Fc region comprises a sequence having at least 95% identity to FCV-1, FCV-2, FCV-3, FCV-4, FCV-5, FCV-6, or FCV-7.

117. The CD19 binding molecule of claim 116, wherein the first variant Fc region and/or the second variant Fc region comprises a sequence having at least 95%, at least 96%, at least 97%, at least 98%, at least 99%, or 100% identity to FCV-1.

118. The CD19 binding molecule of claim 116, wherein the first variant Fc region and/or the second variant Fc region comprises a sequence having at least 95%, at least 96%, at least 97%, at least 98%, at least 99%, or 100% identity to FCV-2.

119. The CD19 binding molecule of claim 116, wherein the first variant Fc region and/or the second variant Fc region comprises a sequence having at least 95%, at least 96%, at least 97%, at least 98%, at least 99%, or 100% identity to FCV-3.

120. The CD19 binding molecule of claim 116, wherein the first variant Fc region and/or the second variant Fc region comprises a sequence having at least 95%, at least 96%, at least 97%, at least 98%, at least 99%, or 100% identity to FCV-4.

121. The CD19 binding molecule of claim 116, wherein the first variant Fc region and/or the second variant Fc region comprises a sequence having at least 95%, at least 96%, at least 97%, at least 98%, at least 99%, or 100% identity to FCV-5.

122. The CD19 binding molecule of claim 116, wherein the first variant Fc region and/or the second variant Fc region comprises a sequence having at least 95%, at least 96%, at least 97%, at least 98%, at least 99%, or 100% identity to FCV-6.

123. The CD19 binding molecule of claim 116, wherein the first variant Fc region and/or the second variant Fc region comprises a sequence having at least 95%, at least 96%, at least 97%, at least 98%, at least 99%, or 100% identity to FCV-7.

124. The CD19 binding molecule of any one of claims 1 to 123, wherein the first variant Fc region and the second variant Fc region together form an Fc heterodimer.

125. The CD19 binding molecule of claim 124, wherein the first and second variant Fc regions comprise the amino acid substitutions T366W: T366S/L368A/Y407V.

126. The CD19 binding molecule of any one of claims 124 to 125, the first and second variant Fc regions comprise the amino acid substitutions S354C: Y349C.

127. A CD19 binding molecule comprising:
(a) a first polypeptide whose amino acid sequence comprises the amino acid sequence of SEQ ID NO:1120;
(b) a second polypeptide whose amino acid sequence comprises the amino acid sequence of SEQ ID NO:1122; and
(c) a third polypeptide whose amino acid sequence comprises the amino acid sequence of SEQ ID NO:1110.

128. A CD19 binding molecule comprising:
(a) a first polypeptide whose amino acid sequence comprises the amino acid sequence of SEQ ID NO:1127;
(b) a second polypeptide whose amino acid sequence comprises the amino acid sequence of SEQ ID NO:1129; and
(c) a third polypeptide whose amino acid sequence comprises the amino acid sequence of SEQ ID NO:1110.

129. A CD19 binding molecule comprising:
(a) a first polypeptide whose amino acid sequence comprises the amino acid sequence of SEQ ID NO:1134;
(b) a second polypeptide whose amino acid sequence comprises the amino acid sequence of SEQ ID NO:1135; and
(c) a third polypeptide whose amino acid sequence comprises the amino acid sequence of SEQ ID NO:1110.

130. A CD19 binding molecule comprising:
(a) a first polypeptide whose amino acid sequence comprises the amino acid sequence of SEQ ID NO:1136;
(b) a second polypeptide whose amino acid sequence comprises the amino acid sequence of SEQ ID NO:1137; and
(c) a third polypeptide whose amino acid sequence comprises the amino acid sequence of SEQ ID NO:1110.

131. A CD19 binding molecule comprising:
(a) a first polypeptide whose amino acid sequence comprises the amino acid sequence of SEQ ID NO:1138;
(b) a second polypeptide whose amino acid sequence comprises the amino acid sequence of SEQ ID NO:1139; and
(c) a third polypeptide whose amino acid sequence comprises the amino acid sequence of SEQ ID NO:1110.

132. A CD19 binding molecule comprising:
(a) a first polypeptide whose amino acid sequence comprises the amino acid sequence of SEQ ID NO:1140;
(b) a second polypeptide whose amino acid sequence comprises the amino acid sequence of SEQ ID NO:1141; and
(c) a third polypeptide whose amino acid sequence comprises the amino acid sequence of SEQ ID NO:1110.

133. A CD19 binding molecule comprising:
(a) a first polypeptide whose amino acid sequence comprises the amino acid sequence of SEQ ID NO:1142;
(b) a second polypeptide whose amino acid sequence comprises the amino acid sequence of SEQ ID NO:1143; and
(c) a third polypeptide whose amino acid sequence comprises the amino acid sequence of SEQ ID NO:1110.

134. A CD19 binding molecule comprising:
(a) a first polypeptide whose amino acid sequence comprises the amino acid sequence of SEQ ID NO:1131;
(b) a second polypeptide whose amino acid sequence comprises the amino acid sequence of SEQ ID NO:1132; and
(c) a third polypeptide whose amino acid sequence comprises the amino acid sequence of SEQ ID NO:1133.

135. A conjugate comprising (a) the CD19 binding molecule of any one of claims 1 to 134, and (b) an agent.

136. The conjugate of claim 135, wherein the agent is a therapeutic agent, a diagnostic agent, a masking moiety, a cleavable moiety, a stabilizing agent, or any combination thereof.

137. A pharmaceutical composition comprising (a) the CD19 binding molecule of any one of claims 1 to 134 or the conjugate of any one of claims 135 to 136 and (b) an excipient.

138. A nucleic acid or plurality of nucleic acids encoding the CD19-binding molecule of any one of claims 1 to 134.

139. A cell engineered to express the CD19 binding molecule of any one claims 1 to 134.

140. A method of producing a CD19 binding molecule, comprising:
(a) culturing the cell of claim 139 in conditions under which the CD19 binding molecule is expressed; and
(b) recovering the CD19-binding molecule from the cell culture.

141. A combination comprising the CD19 binding molecule of any one of claims 1 to 134 and at least one additional therapeutic agent.

142. The combination of claim 141, wherein the one or more additional therapeutic agents comprise an immunomodulatory imide drug (IMiD).

143. The combination of claim 142, wherein the immunomodulatory imide drug (IMiD) is lenalidomide, thalidomide, pomalidomide, or iberdomide.

144. The combination of claim 143, wherein the immunomodulatory imide drug (IMiD) is lenalidomide.

145. The CD19 binding molecule of any one of claims 1 to 134, the composition of claim 137 or combination of any one of claims 141 to 144 for use as a medicament.

146. The CD19 binding molecule of any one of claims 1 to 134, the composition of claim 137 or combination of any one of claims 141 to 144 for use in treating a CD19-associated disease or disorder.

147. Use of the antibody or antigen binding fragment thereof of any one of claims 1 to 134, the composition of claim 137 or combination of any one of claims 141 to 144 in the manufacture of a medicament to treat a CD19-associated disease or disorder.

148. A method of treating a subject with a CD19-associated disease or disorder, comprising administering to the subject an effective amount of the CD19 binding molecule of any one of claims 1 to 134, the composition of claim 137 or combination of any one of claims 141 to 144.

149. The CD19 binding molecule, combination or composition for use of claim 146, or use of claim 147 or method of claim 148, wherein the CD19-associated disease or disorder is cancer.

150. The CD19 binding molecule, combination or composition for use of claim 146, or use of claim 147 or method of claim 148, wherein the disease or disorder is a plasma cell neoplasm.

151. The CD19 binding molecule, combination or composition for use of claim 146, or use of claim 147 or method of claim 148, wherein the disease or disorder is a B cell malignancy that expresses cell surface CD19.

152. The CD19 binding molecule, combination or composition for use of claim 146, or use of claim 147 or method of claim 148, wherein the CD19-associated disease or disorder is non-Hodgkin's lymphoma.

153. The CD19 binding molecule, combination or composition for use of claim 146, or use of claim 147 or method of claim 148, wherein the CD19-associated disease or disorder is diffuse large B-cell lymphoma (DLBCL), optionally wherein the DLBCL is relapsed or refractory DLBCL.

154. The CD19 binding molecule, combination or composition for use of claim 146, or use of claim 147 or method of claim 148, wherein the CD19-associated disease or disorder is Burkitt's lymphoma.

155. The CD19 binding molecule, combination or composition for use of any one of claims 152 to 154, wherein the subject has failed at least one prior line of standard of care therapy.

156. The CD19 binding molecule, combination or composition for use of claim 155, wherein the subject has failed up to five prior lines of standard of care therapies.

157. The CD19 binding molecule, combination or composition for use of claim 155 or 156, wherein the subject has failed one prior line of standard of care therapy.

158. The CD19 binding molecule, combination or composition for use of claim 155 or 156, wherein the subject has failed two prior lines of standard of care therapy.

159. The CD19 binding molecule, combination or composition for use of claim 155 or 156, wherein the subject has failed three prior lines of standard of care therapy.

160. The CD19 binding molecule, combination or composition for use of claim 155 or 156, wherein the subject has failed four prior lines of standard of care therapy.

161. The CD19 binding molecule, combination or composition for use of claim 155 or 156, wherein the subject has failed five prior lines of standard of care therapy.

162. The CD19 binding molecule, combination or composition for use of any one of claims 155 to 161, wherein the at least one prior line of standard of care therapies comprise an anti-CD20 therapy.

163. The CD19 binding molecule, combination or composition for use of claim 162, wherein the anti-CD20 therapy is rituximab.

164. The CD19 binding molecule, combination or composition for use of any one of claims 155 to 163, wherein the subject is intolerant to or ineligible for one or more other approved therapies.

165. The CD19 binding molecule, combination or composition for use of claim 164, wherein the one or more other approved therapies comprise an autologous stem cell transplant (ASCT).

166. The CD19 binding molecule, combination or composition for use of any one of claims 155 to 165, wherein the subject is a non-responder to a CAR composition.

167. The CD19 binding molecule, combination or composition for use of claim 166, wherein the CAR composition is an anti-CD19 CAR composition.

168. The CD19 binding molecule, combination or composition for use of claim 166 or claim 167, wherein the CAR composition comprises CTL019, tisagenlecleucel, axicabtagene ciloleucel, brexucabtagene autoleucel or lisocabtagene maraleucel.

The application's sequence listing, which the Patent Office published only in electronic form, follows.

SEQUENCE LISTING (1168 sequences)

SEQ ID NO: 1 - protein, 10 aa, Artificial Sequence
  source: /note="Description of Artificial Sequence: Synthetic peptide"
GYTFTTYWIQ

SEQ ID NO: 2 - protein, 17 aa, Artificial Sequence
  source: /note="Description of Artificial Sequence: Synthetic peptide"
AVYPGDADTRYTQKFQG

SEQ ID NO: 3 - protein, 11 aa, Artificial Sequence
  source: /note="Description of Artificial Sequence: Synthetic peptide"
DAGLEYYALDY

SEQ ID NO: 4 - protein, 5 aa, Artificial Sequence
  source: /note="Description of Artificial Sequence: Synthetic peptide"
TYWIQ

SEQ ID NO: 5 - protein, 17 aa, Artificial Sequence
  source: /note="Description of Artificial Sequence: Synthetic peptide"
AVYPGDADTRYTQKFQG

SEQ ID NO: 6 - protein, 11 aa, Artificial Sequence
  source: /note="Description of Artificial Sequence: Synthetic peptide"
DAGLEYYALDY

SEQ ID NO: 7 - protein, 7 aa, Artificial Sequence
  source: /note="Description of Artificial Sequence: Synthetic peptide"
GYTFTTY

SEQ ID NO: 8 - protein, 6 aa, Artificial Sequence
  source: /note="Description of Artificial Sequence: Synthetic peptide"
YPGDAD

SEQ ID NO: 9 - protein, 11 aa, Artificial Sequence
  source: /note="Description of Artificial Sequence: Synthetic peptide"
DAGLEYYALDY

SEQ ID NO: 10 - protein, 8 aa, Artificial Sequence
  source: /note="Description of Artificial Sequence: Synthetic peptide"
GYTFTTYW

SEQ ID NO: 11 - protein, 8 aa, Artificial Sequence
  source: /note="Description of Artificial Sequence: Synthetic peptide"
VYPGDADT

SEQ ID NO: 12 - protein, 13 aa, Artificial Sequence
  source: /note="Description of Artificial Sequence: Synthetic peptide"
GRDAGLEYYALDY

SEQ ID NO: 13 - protein, 120 aa, Artificial Sequence
  source: /note="Description of Artificial Sequence: Synthetic polypeptide"
QVQLVQSGAEVKKPGASVKVSCKASGYTFTTYWIQWVRQAPGQRLEWMGAVYPGDADTRYTQKFQGRVTLTADRSASTAYMELSSLRSEDTAVYYCGRDAGLEYYALDYWGQGTLVTVSS

SEQ ID NO: 14 - protein, 11 aa, Artificial Sequence
  source: /note="Description of Artificial Sequence: Synthetic peptide"
RASQDVGTAVA

SEQ ID NO: 15 - protein, 7 aa, Artificial Sequence
  source: /note="Description of Artificial Sequence: Synthetic peptide"
WASTRHT

SEQ ID NO: 16 - protein, 10 aa, Artificial Sequence
  source: /note="Description of Artificial Sequence: Synthetic peptide"
QQYANFPLYT

SEQ ID NO: 17 - protein, 11 aa, Artificial Sequence
  source: /note="Description of Artificial Sequence: Synthetic peptide"
RASQDVGTAVA

SEQ ID NO: 18 - protein, 7 aa, Artificial Sequence
  source: /note="Description of Artificial Sequence: Synthetic peptide"
WASTRHT

SEQ ID NO: 19 - protein, 10 aa, Artificial Sequence
  source: /note="Description of Artificial Sequence: Synthetic peptide"
QQYANFPLYT

SEQ ID NO: 20 - protein, 7 aa, Artificial Sequence
  source: /note="Description of Artificial Sequence: Synthetic peptide"
SQDVGTA

SEQ ID NO: 21 - protein, 3 aa, Artificial Sequence
  source: /note="Description of Artificial Sequence: Synthetic peptide"
WAS

SEQ ID NO: 22 - protein, 7 aa, Artificial Sequence
  source: /note="Description of Artificial Sequence: Synthetic peptide"
YANFPLY

SEQ ID NO: 23 - protein, 6 aa, Artificial Sequence
  source: /note="Description of Artificial Sequence: Synthetic peptide"
QDVGTA

SEQ ID NO: 24 - protein, 3 aa, Artificial Sequence
  source: /note="Description of Artificial Sequence: Synthetic peptide"
WAS

SEQ ID NO: 25 - protein, 10 aa, Artificial Sequence
  source: /note="Description of Artificial Sequence: Synthetic peptide"
QQYANFPLYT

SEQ ID NO: 26 - protein, 108 aa, Artificial Sequence
  source: /note="Description of Artificial Sequence: Synthetic polypeptide"
EIVMTQSPATLSVSPGERATLSCRASQDVGTAVAWYQQKPGQAPRLLIYWASTRHTGIPARFSGSGSGTEFTLTISSLQSEDFAVYFCQQYANFPLYTFGQGTKLEIK

SEQ ID NO: 27 - protein, 10 aa, Artificial Sequence
  source: /note="Description of Artificial Sequence: Synthetic peptide"
GYSFTNYWMN

SEQ ID NO: 28 - protein, 17 aa, Artificial Sequence
  source: /note="Description of Artificial Sequence: Synthetic peptide"
MIHPSDSEIRLNQKFQG

SEQ ID NO: 29 - protein, 10 aa, Artificial Sequence
  source: /note="Description of Artificial Sequence: Synthetic peptide"
WYYLSSPMDY

SEQ ID NO: 30 - protein, 5 aa, Artificial Sequence
  source: /note="Description of Artificial Sequence: Synthetic peptide"
NYWMN

SEQ ID NO: 31 - protein, 17 aa, Artificial Sequence
  source: /note="Description of Artificial Sequence: Synthetic peptide"
MIHPSDSEIRLNQKFQG

SEQ ID NO: 32 - protein, 10 aa, Artificial Sequence
  source: /note="Description of Artificial Sequence: Synthetic peptide"
WYYLSSPMDY

SEQ ID NO: 33 - protein, 7 aa, Artificial Sequence
  source: /note="Description of Artificial Sequence: Synthetic peptide"
GYSFTNY

SEQ ID NO: 34 - protein, 6 aa, Artificial Sequence
  source: /note="Description of Artificial Sequence: Synthetic peptide"
HPSDSE

SEQ ID NO: 35 - protein, 10 aa, Artificial Sequence
  source: /note="Description of Artificial Sequence: Synthetic peptide"
WYYLSSPMDY

SEQ ID NO: 36 - protein, 8 aa, Artificial Sequence
  source: /note="Description of Artificial Sequence: Synthetic peptide"
GYSFTNYW

SEQ ID NO: 37 - protein, 8 aa, Artificial Sequence
  source: /note="Description of Artificial Sequence: Synthetic peptide"
IHPSDSEI

SEQ ID NO: 38 - protein, 12 aa, Artificial Sequence
  source: /note="Description of Artificial Sequence: Synthetic peptide"
SRWYYLSSPMDY

SEQ ID NO: 39 - protein, 119 aa, Artificial Sequence
  source: /note="Description of Artificial Sequence: Synthetic polypeptide"
EVQLVQSGAEVKKPGESLKISCKASGYSFTNYWMNWVRQMPGKGLEWMGMIHPSDSEIRLNQKFQGQVTLSVDKSIGTAYMQWSSLKASDTAMYYCSRWYYLSSPMDYWGQGTTVTVSS

SEQ ID NO: 40 - protein, 11 aa, Artificial Sequence
  source: /note="Description of Artificial Sequence: Synthetic peptide"
RASQDVGTAVA

SEQ ID NO: 41 - protein, 7 aa, Artificial Sequence
  source: /note="Description of Artificial Sequence: Synthetic peptide"
WASTRHT

SEQ ID NO: 42 - protein, 9 aa, Artificial Sequence
  source: /note="Description of Artificial Sequence: Synthetic peptide"
QQYSSYPYT

SEQ ID NO: 43 - protein, 11 aa, Artificial Sequence
  source: /note="Description of Artificial Sequence: Synthetic peptide"
RASQDVGTAVA

SEQ ID NO: 44 - protein, 7 aa, Artificial Sequence
  source: /note="Description of Artificial Sequence: Synthetic peptide"
WASTRHT

SEQ ID NO: 45 - protein, 9 aa, Artificial Sequence
  source: /note="Description of Artificial Sequence: Synthetic peptide"
QQYSSYPYT

SEQ ID NO: 46 - protein, 7 aa, Artificial Sequence
  source: /note="Description of Artificial Sequence: Synthetic peptide"
SQDVGTA

SEQ ID NO: 47 - protein, 3 aa, Artificial Sequence
  source: /note="Description of Artificial Sequence: Synthetic peptide"
WAS

SEQ ID NO: 48 - protein, 6 aa, Artificial Sequence
  source: /note="Description of Artificial Sequence: Synthetic peptide"
YSSYPY

SEQ ID NO: 49 - protein, 6 aa, Artificial Sequence
  source: /note="Description of Artificial Sequence: Synthetic peptide"
QDVGTA

SEQ ID NO: 50 - protein, 3 aa, Artificial Sequence
  source: /note="Description of Artificial Sequence: Synthetic peptide"
WAS

SEQ ID NO: 51 - protein, 9 aa, Artificial Sequence
  source: /note="Description of Artificial Sequence: Synthetic peptide"
QQYSSYPYT

SEQ ID NO: 52 - protein, 107 aa, Artificial Sequence
  source: /note="Description of Artificial Sequence: Synthetic polypeptide"
EIVMTQSPATLSVSPGERATLSCRASQDVGTAVAWYQQKPGQAPRLLIYWASTRHTGIPARFSGSGSGTEFTLTISSLQSEDFAVYFCQQYSSYPYTFGQGTKLEIK

SEQ ID NO: 53 - protein, 15 aa, Artificial Sequence
  source: /note="Description of Artificial Sequence: Synthetic peptide"
GGGGSGGGGSGGGGS

SEQ ID NO: 54 - protein, 6 aa, Artificial Sequence
  source: /note="Description of Artificial Sequence: Synthetic 6xHis tag"
HHHHHH

SEQ ID NO: 55 - protein, 4 aa, Artificial Sequence
  source: /note="Description of Artificial Sequence: Synthetic peptide"
CPPC

SEQ ID NO: 56 - protein, 4 aa, Artificial Sequence
  source: /note="Description of Artificial Sequence: Synthetic peptide"
SPPS

SEQ ID NO: 57 - protein, 19 aa, Homo sapiens
VPSTPPTPSPSTPPTPSPS

SEQ ID NO: 58 - protein, 6 aa, Homo sapiens
VPPPPP

SEQ ID NO: 59 - protein, 58 aa, Homo sapiens
ESPKAQASSVPTAQPQAEGSLAKATTAPATTRNTGRGGEEKKKEKEKEEQEERETKTP

SEQ ID NO: 60 - protein, 15 aa, Homo sapiens
EPKSCDKTHTCPPCP

SEQ ID NO: 61 - protein, 12 aa, Homo sapiens
ERKCCVECPPCP

SEQ ID NO: 62 - protein, 62 aa, Homo sapiens
ELKTPLGDTTHTCPRCPEPKSCDTPPPCPRCPEPKSCDTPPPCPRCPEPKSCDTPPPCPRCP

SEQ ID NO: 63 - protein, 12 aa, Homo sapiens
ESKYGPPCPSCP

SEQ ID NO: 64 - protein, 12 aa, Homo sapiens
ESKYGPPCPPCP

SEQ ID NO: 65 - protein, 4 aa, Artificial Sequence
  source: /note="Description of Artificial Sequence: Synthetic peptide"
CPSC

SEQ ID NO: 66 - protein, 4 aa, Artificial Sequence
  source: /note="Description of Artificial Sequence: Synthetic peptide"
CPRC

SEQ ID NO: 67 - protein, 4 aa, Artificial Sequence
  source: /note="Description of Artificial Sequence: Synthetic peptide"
SPPC

SEQ ID NO: 68 - protein, 4 aa, Artificial Sequence
  source: /note="Description of Artificial Sequence: Synthetic peptide"
CPPS

SEQ ID NO: 69 - protein, 8 aa, Artificial Sequence
  source: /note="Description of Artificial Sequence: Synthetic peptide"
DKTHTCAA

SEQ ID NO: 70 - protein, 11 aa, Artificial Sequence
  source: /note="Description of Artificial Sequence: Synthetic peptide"
DKTHTCPPCPA

SEQ ID NO: 71 - protein, 18 aa, Artificial Sequence
  source: /note="Description of Artificial Sequence: Synthetic peptide"
DKTHTCPPCPATCPPCPA

SEQ ID NO: 72 - protein, 25 aa, Artificial Sequence
  source: /note="Description of Artificial Sequence: Synthetic peptide"
DKTHTCPPCPATCPPCPATCPPCPA

SEQ ID NO: 73 - protein, 30 aa, Artificial Sequence
  source: /note="Description of Artificial Sequence: Synthetic polypeptide"
DKTHTCPPCPAGKPTLYNSLVMSDTAGTCY

SEQ ID NO: 74 - protein, 31 aa, Artificial Sequence
  source: /note="Description of Artificial Sequence: Synthetic polypeptide"
DKTHTCPPCPAGKPTHVNVSVVMAEVDGTCY

SEQ ID NO: 75 - protein, 15 aa, Artificial Sequence
  source: /note="Description of Artificial Sequence: Synthetic peptide"
DKTHTCCVECPPCPA

SEQ ID NO: 76 - protein, 26 aa, Artificial Sequence
  source: /note="Description of Artificial Sequence: Synthetic peptide"
DKTHTCPRCPEPKSCDTPPPCPRCPA

SEQ ID NO: 77 - protein, 11 aa, Artificial Sequence
  source: /note="Description of Artificial Sequence: Synthetic peptide"
DKTHTCPSCPA

SEQ ID NO: 78 - protein, 5 aa, Artificial Sequence
  source: /note="Description of Artificial Sequence: Synthetic peptide"
  source: /note="See specification as filed for detailed description of substitutions and preferred embodiments"
GGGGS

SEQ ID NO: 79 - protein, 5 aa, Artificial Sequence
  source: /note="Description of Artificial Sequence: Synthetic peptide"
ADAAP

SEQ ID NO: 80 - protein, 11 aa, Artificial Sequence
  source: /note="Description of Artificial Sequence: Synthetic peptide"
ADAAPTVSIFP

SEQ ID NO: 81 - protein, 12 aa, Artificial Sequence
  source: /note="Description of Artificial Sequence: Synthetic peptide"
ADAAPTVSIFPP

SEQ ID NO: 82 - protein, 6 aa, Artificial Sequence
  source: /note="Description of Artificial Sequence: Synthetic peptide"
AKTTAP

SEQ ID NO: 83 - protein, 13 aa, Artificial Sequence
  source: /note="Description of Artificial Sequence: Synthetic peptide"
AKTTAPSVYPLAP

SEQ ID NO: 84 - protein, 17 aa, Artificial Sequence
  source: /note="Description of Artificial Sequence: Synthetic peptide"
AKTTPKLEEGEFSEARV

SEQ ID NO: 85 - protein, 9 aa, Artificial Sequence
  source: /note="Description of Artificial Sequence: Synthetic peptide"
AKTTPKLGG

SEQ ID NO: 86 - protein, 6 aa, Artificial Sequence
  source: /note="Description of Artificial Sequence: Synthetic peptide"
AKTTPP

SEQ ID NO: 87 - protein, 13 aa, Artificial Sequence
  source: /note="Description of Artificial Sequence: Synthetic peptide"
AKTTPPSVTPLAP

SEQ ID NO: 88 - protein, 6 aa, Artificial Sequence
  source: /note="Description of Artificial Sequence: Synthetic peptide"
ASTKGP

SEQ ID NO: 89 - protein, 13 aa, Artificial Sequence
  source: /note="Description of Artificial Sequence: Synthetic peptide"
ASTKGPSVFPLAP

SEQ ID NO: 90 - protein, 26 aa, Artificial Sequence
  source: /note="Description of Artificial Sequence: Synthetic peptide"
ASTKGPSVFPLAPASTKGPSVFPLAP

SEQ ID NO: 91 - protein, 14 aa, Artificial Sequence
  source: /note="Description of Artificial Sequence: Synthetic peptide"
EGKSSGSGSESKST

SEQ ID NO: 92 - protein, 15 aa, Artificial Sequence
  source: /note="Description of Artificial Sequence: Synthetic peptide"
GEGESGEGESGEGES

SEQ ID NO: 93 - protein, 20 aa, Artificial Sequence
  source: /note="Description of Artificial Sequence: Synthetic peptide"
GEGESGEGESGEGESGEGES

SEQ ID NO: 94 - protein, 15 aa, Artificial Sequence
  source: /note="Description of Artificial Sequence: Synthetic peptide"
GEGGSGEGGSGEGGS

SEQ ID NO: 95 - protein, 15 aa, Artificial Sequence
  source: /note="Description of Artificial Sequence: Synthetic peptide"
GENKVEYAPALMALS

SEQ ID NO: 96 - protein, 15 aa, Artificial Sequence
  source: /note="Description of Artificial Sequence: Synthetic peptide"
GGEGSGGEGSGGEGS

SEQ ID NO: 97 - protein, 15 aa, Artificial Sequence
  source: /note="Description of Artificial Sequence: Synthetic peptide"
GGGESGGEGSGEGGS

SEQ ID NO: 98 - protein, 15 aa, Artificial Sequence
  source: /note="Description of Artificial Sequence: Synthetic peptide"
GGGESGGGESGGGES

SEQ ID NO: 99 - protein, 50 aa, Artificial Sequence
  source: /note="Description of Artificial Sequence: Synthetic polypeptide"
  SITE (1)..(50): /note="This sequence may encompass 1-10 'Gly Gly Gly Gly Ser' repeating units"
GGGGSGGGGSGGGGSGGGGSGGGGSGGGGSGGGGSGGGGSGGGGSGGGGS

SEQ ID NO: 100 - protein, 10 aa, Artificial Sequence
  source: /note="Description of Artificial Sequence: Synthetic peptide"
GGGGSGGGGS

SEQ ID NO: 101 - protein, 20 aa, Artificial Sequence
  source: /note="Description of Artificial Sequence: Synthetic peptide"
GGGGSGGGGSGGGGSGGGGS

SEQ ID NO: 102 - protein, 15 aa, Artificial Sequence
  source: /note="Description of Artificial Sequence: Synthetic peptide"
GGGKSGGGKSGGGKS

SEQ ID NO: 103 - protein, 15 aa, Artificial Sequence
  source: /note="Description of Artificial Sequence: Synthetic peptide"
GGGKSGGKGSGKGGS

SEQ ID NO: 104 - protein, 15 aa, Artificial Sequence
  source: /note="Description of Artificial Sequence: Synthetic peptide"
GGKGSGGKGSGGKGS

SEQ ID NO: 105 - protein, 5 aa, Artificial Sequence
  source: /note="Description of Artificial Sequence: Synthetic peptide"
GGSGG

SEQ ID NO: 106 - protein, 9 aa, Artificial Sequence
  source: /note="Description of Artificial Sequence: Synthetic peptide"
GGSGGGGSG

SEQ ID NO: 107 - protein, 13 aa, Artificial Sequence
  source: /note="Description of Artificial Sequence: Synthetic peptide"
GGSGGGGSGGGGS

SEQ ID NO: 108 - protein, 15 aa, Artificial Sequence
  source: /note="Description of Artificial Sequence: Synthetic peptide"
GHEAAAVMQVQYPAS

SEQ ID NO: 109 - protein, 15 aa, Artificial Sequence
  source: /note="Description of Artificial Sequence: Synthetic peptide"
GKGGSGKGGSGKGGS

SEQ ID NO: 110 - protein, 15 aa, Artificial Sequence
  source: /note="Description of Artificial Sequence: Synthetic peptide"
GKGKSGKGKSGKGKS

SEQ ID NO: 111 - protein, 20 aa, Artificial Sequence
  source: /note="Description of Artificial Sequence: Synthetic peptide"
GKGKSGKGKSGKGKSGKGKS

SEQ ID NO: 112 - protein, 15 aa, Artificial Sequence
  source: /note="Description of Artificial Sequence: Synthetic peptide"
GKPGSGKPGSGKPGS

SEQ ID NO: 113 - protein, 20 aa, Artificial Sequence
  source: /note="Description of Artificial Sequence: Synthetic peptide"
GKPGSGKPGSGKPGSGKPGS

SEQ ID NO: 114 - protein, 15 aa, Artificial Sequence
  source: /note="Description of Artificial Sequence: Synthetic peptide"
GPAKELTPLKEAKVS

SEQ ID NO: 115 - protein, 12 aa, Artificial Sequence
  source: /note="Description of Artificial Sequence: Synthetic peptide"
GSAGSAAGSGEF

SEQ ID NO: 116 - protein, 14 aa, Artificial Sequence
  source: /note="Description of Artificial Sequence: Synthetic peptide"
IRPRAIGGSKPRVA

SEQ ID NO: 117 - protein, 18 aa, Artificial Sequence
  source: /note="Description of Artificial Sequence: Synthetic peptide"
KESGSVSSEQLAQFRSLD

SEQ ID NO: 118 - protein, 15 aa, Artificial Sequence
  source: /note="Description of Artificial Sequence: Synthetic peptide"
KTTPKLEEGEFSEAR

SEQ ID NO: 119 - protein, 6 aa, Artificial Sequence
  source: /note="Description of Artificial Sequence: Synthetic peptide"
QPKAAP

SEQ ID NO: 120 - protein, 13 aa, Artificial Sequence
  source: /note="Description of Artificial Sequence: Synthetic peptide"
QPKAAPSVTLFPP

SEQ ID NO: 121 - protein, 27 aa, Artificial Sequence
  source: /note="Description of Artificial Sequence: Synthetic peptide"
RADAAAAGGGGSGGGGSGGGGSGGGGS

SEQ ID NO: 122 - protein, 12 aa, Artificial Sequence
  source: /note="Description of Artificial Sequence: Synthetic peptide"
RADAAAAGGPGS

SEQ ID NO: 123 - protein, 6 aa, Artificial Sequence
  source: /note="Description of Artificial Sequence: Synthetic peptide"
RADAAP

SEQ ID NO: 124 - protein, 9 aa, Artificial Sequence
  source: /note="Description of Artificial Sequence: Synthetic peptide"
RADAAPTVS

SEQ ID NO: 125 - protein, 6 aa, Artificial Sequence
  source: /note="Description of Artificial Sequence: Synthetic peptide"
SAKTTP

SEQ ID NO: 126 - protein, 18 aa, Artificial Sequence
  source: /note="Description of Artificial Sequence: Synthetic peptide"
SAKTTPKLEEGEFSEARV

SEQ ID NO: 127 - protein, 10 aa, Artificial Sequence
  source: /note="Description of Artificial Sequence: Synthetic peptide"
SAKTTPKLGG

SEQ ID NO: 128 - protein, 14 aa, Artificial Sequence
  source: /note="Description of Artificial Sequence: Synthetic peptide"
STAGDTHLGGEDFD

SEQ ID NO: 129 - protein, 5 aa, Artificial Sequence
  source: /note="Description of Artificial Sequence: Synthetic peptide"
TVAAP

SEQ ID NO: 130 - protein, 12 aa, Artificial Sequence
  source: /note="Description of Artificial Sequence: Synthetic peptide"
TVAAPSVFIFPP

SEQ ID NO: 131 - protein, 24 aa, Artificial Sequence
  source: /note="Description of Artificial Sequence: Synthetic peptide"
TVAAPSVFIFPPTVAAPSVFIFPP

SEQ ID NO: 132 - protein, 18 aa, Artificial Sequence
  source: /note="Description of Artificial Sequence: Synthetic peptide"
GSTSGSGKPGSGEGSTKG

SEQ ID NO: 133 - protein, 19 aa, Artificial Sequence
  source: /note="Description of Artificial Sequence: Synthetic peptide"
PRGASKSGSASQTGSAPGS

SEQ ID NO: 134 - protein, 19 aa, Artificial Sequence
  source: /note="Description of Artificial Sequence: Synthetic peptide"
GTAAAGAGAAGGAAAGAAG

SEQ ID NO: 135 - protein, 19 aa, Artificial Sequence
  source: /note="Description of Artificial Sequence: Synthetic peptide"
GTSGSSGSGSGGSGSGGGG

SEQ ID NO: 136 - protein, 119 aa, Artificial Sequence [sequence omitted]

SEQ ID NO: 137 - protein, 106 aa, Artificial Sequence [sequence omitted]

SEQ ID NO: 138 - protein, 125 aa, Artificial Sequence
  source: /note="Description of Artificial Sequence: Synthetic polypeptide"
EVQLVESGGGLVQPKGSLKLSCAASGFTFNTYAMNWVRQAPGKGLEWVARIRSKYNNYATYYADSVKDRFTISRDDSQSILYLQMNNLKTEDTAMYYCVRHGNFGNSYVSWFAYWGQGTLVTVSA

SEQ ID NO: 139 - protein, 109 aa, Artificial Sequence
  source: /note="Description of Artificial Sequence: Synthetic polypeptide"
QAVVTQESALTTSPGETVTLTCRSSTGAVTTSNYANWVQEKPDHLFTGLIGGTNKRAPGVPARFSGSLIGDKAALTITGAQTEDEAIYFCALWYSNLWVFGGGTKLTVL

SEQ ID NO: 140 - protein, 119 aa, Artificial Sequence
  source: /note="Description of Artificial Sequence: Synthetic polypeptide"
QVQLQQSGAELARPGASVKMSCKASGYTFTSYTMHWVKQRPGQGLEWIGYINPSSGYTKYNQKFKDKATLTADKSSSTAYMQLSSLTSEDSAVYYCARWQDYDVYFDYWGQGTTLTVSS

SEQ ID NO: 141 - protein, 106 aa, Artificial Sequence
  source: /note="Description of Artificial Sequence: Synthetic polypeptide"
QIVLSQSPAILSASPGEKVTMTCRASSSVSYMHWYQQKPGSSPKPWIYATSNLASGVPARFSGSGSGTSYSLTISRVEAEDAATYYCQQWSSNPPTFGGGTKLETK

SEQ ID NO: 142 - protein, 106 aa, Artificial Sequence
  source: /note="Description of Artificial Sequence: Synthetic polypeptide"
QIVLTQSPAIMSASPGEKVTMTCRASSSVSYMNWYQQKSGTSPKRWIYDTSKVASGVPYRFSGSGSGTSYSLTISSMEAEDAATYYCQQWSSNPLTFGSGTKLEIN

SEQ ID NO: 143 - protein, 119 aa, Artificial Sequence [sequence omitted]

SEQ ID NO: 144 - protein, 106 aa, Artificial Sequence [sequence omitted]

SEQ ID NO: 145 - protein, 118 aa, Artificial Sequence [sequence omitted]

SEQ ID NO: 146 - protein, 108 aa, Artificial Sequence [sequence omitted]

SEQ ID NO: 147 - protein, 124 aa, Artificial Sequence
  source: /note="Description of Artificial Sequence: Synthetic polypeptide"
EVQLVESGGGLVQPGGSLRLSCAASGFTFSTYAMNWVRQAPGKGLEWVGRIRSKYNNYATYYADSVKDRFISRDDSKNSLYLQMNSLKTEDTAVYYCVRHGNFGNSYVSWFAYWGQGTLVTVSS

SEQ ID NO: 148 - protein, 107 aa, Artificial Sequence
  source: /note="Description of Artificial Sequence: Synthetic polypeptide"
QAVVTQEPSLTVSPGGTVTLTCRSSTGAVTTSNYANWVQQKPGQAPRGLIGGTNKRAPWTPARFSGSLLGGKAALIGAQAEDEADYYCALWYSNLWVFGGGTKLTVL

SEQ ID NO: 149 - protein, 119 aa, Artificial Sequence
  source: /note="Description of Artificial Sequence: Synthetic polypeptide"
DIKLQQSGAELARPGASVKMSCKTSGYTFTRYTMHWVKQRPGQGLEWIGYINPSRGYTNYNQKFKDKATLTTDKSSSTAYMQLSSLTSEDSAVYYCARYYDDHYCLDYWGQGTTLTVSS

SEQ ID NO: 150 - protein, 105 aa, Artificial Sequence
  source: /note="Description of Artificial Sequence: Synthetic polypeptide"
DIQLTQSPAIMSASPGEKVTMTCRASSSVSYMNWYQQKSGTSPKRWIYDTSKVASGVPYRFSGSGSGTSYSLISSMEAEDAATYYCQQWSSNPLTFGAGTKLELK

SEQ ID NO: 151 - protein, 124 aa, Artificial Sequence
  source: /note="Description of Artificial Sequence: Synthetic polypeptide"
EVQLVESGGGLVQPGGSLRLSCAASGFTFNTYAMNWVRQAPGKGLEWVARIRSKYNNYATYYADSVKDRFISRDDSKNSLYLQMNSLKTEDTAVYYCVRHGNFGNSYVSWFAYWGQGTLVTVSS

SEQ ID NO: 152 - protein, 125 aa, Artificial Sequence
  source: /note="Description of Artificial Sequence: Synthetic polypeptide"
EVKLLESGGGLVQPKGSLKLSCAASGFTFNTYAMNWVRQAPGKGLEWVARIRSKYNNYATYYADSVKDRFTISRDDSQSILYLQMNNLKTEDTAMYYCVRHGNFGNSYVSWFAYWGQGTLVTVSA

SEQ ID NO: 153 - protein, 125 aa, Artificial Sequence
  source: /note="Description of Artificial Sequence: Synthetic polypeptide"
EVQLVESGGGLVQPGGSLKLSCAASGFTFNSYAMNWVRQAPGKGLEWVARIRSKYNNYATYYADSVKGRFTISRDDSKNTAYLQMNNLKTEDTAVYYCVRHGNFGNSYVSWWAYWGQGTLVTVSS

SEQ ID NO: 154 - protein, 109 aa, Artificial Sequence
  source: /note="Description of Artificial Sequence: Synthetic polypeptide"
QTVVTQEPSLTVSPGGTVTLTCGSSTGAVTSGNYPNWVQQKPGQAPRGLIGGTKFLAPGTPQRFSGSLLGGKAALTLSGVQPEDEAEYYCVLWYSNRWVFGGGTKLTVL

SEQ ID NO: 155 - protein, 125 aa, Artificial Sequence
  source: /note="Description of Artificial Sequence: Synthetic polypeptide"
EVQLVESGGGLVQPGGSLKLSCAASGFTFNKYAMNWVRQAPGKGLEWVARIRSKYNNYATYYADSVKDRFTISRDDSKNTAYLQMNNLKTEDTAVYYCVRHGNFGNSYISYWAYWGQGTLVTVSS

SEQ ID NO: 156 - protein, 109 aa, Artificial Sequence
  source: /note="Description of Artificial Sequence: Synthetic polypeptide"
QTVVTQEPSLTVSPGGTVTLTCGSSTGAVTSGNYPNWVQQKPGQAPRGLIGGTKFLAPGTPARFSGSLLGGKAALTLSGVQPEDEAEYYCVLWYSNRWVFGGGTKLTVL

SEQ ID NO: 157 - protein, 254 aa, Artificial Sequence
  source: /note="Description of Artificial Sequence: Synthetic polypeptide"
EVQLVESGGGLVQPGGSLKLSCAASGFTFNKYAMNWVRQAPGKGLEWVARIRSKYNNYATYYADSVKDRFTISRDDSKNTAYLQMNNLKTEDTAVYYCVRHGNFGNSYISYWAYWGQGTLVTVSSGGGGSGGGGSGGGGSGGGGSQTVVTQEPSLTVSPGGTVTLTCGSSTGAVTSGNYPNWVQQKPGQAPRGLIGGTKFLAPGTPARFSGSLLGGKAALTLSGVQPEDEAEYYCVLWYSNRWVFGGGTKLTVL

SEQ ID NO: 158 - protein, 119 aa, Artificial Sequence
  source: /note="Description of Artificial Sequence: Synthetic polypeptide"
QVQLVQSGAEVKKPGASVKVSCKASGYTFTRYTMHWVRQAPGQGLEWMGYINPSRGYTNYNQKFKDRVTMTTDTSISTAYMELSRLRSDDTAVYYCARYYDDHYCLDYWGQGTLVTVSS

SEQ ID NO: 159 - protein, 106 aa, Artificial Sequence
  source: /note="Description of Artificial Sequence: Synthetic polypeptide"
EIVLTQSPATLSLSPGERATLSCSASSSVSYMNWYQQKPGQAPRLLIYDTSKLASGVPAHFRGSGSGTDFTLTISSLEPEDFAVYYCQQWSSNPFTFGQGTKVEIK

SEQ ID NO: 160 - protein, 125 aa, Artificial Sequence
  source: /note="Description of Artificial Sequence: Synthetic polypeptide"
EVQLVESGGGLVQPGGSLRLSCAASGFTFSTYAMNWVRQAPGKGLEWVSRIRSKYNNYATYYADSVKDRFTISRDDSKNTLYLQMNSLRAEDTAVYYCARHGNFGNSYVSWFAYWGQGTMVTVSS

SEQ ID NO: 161 - protein, 109 aa, Artificial Sequence
  source: /note="Description of Artificial Sequence: Synthetic polypeptide"
QAVVTQEPSLTVSPGGTVTLTCRSSTGAVTTSNYANWVQQKPGQAPRGLIGGTNKRAPGTPARFSGSLLGGKAALTLSGVQPEDEAEYYCALWYSNLWVFGGGTKLTVL

SEQ ID NO: 162 - protein, 125 aa, Artificial Sequence
  source: /note="Description of Artificial Sequence: Synthetic polypeptide"
EVQLVESGGGLVQPGGSLRLSCAASGFTFNTYAMNWVRQAPGKGLEWVGRIRSKYNNYATYYADSVKDRFTISRDDSKNSLYLQMNSLKTEDTAVYYCVRHGNFGNSYVSWFAYWGQGTLVTVSS

SEQ ID NO: 163 - protein, 109 aa, Artificial Sequence
  source: /note="Description of Artificial Sequence: Synthetic polypeptide"
QAVVTQEPSLTVSPGGTVTLTCRSSTGAVTTSNYANWVQEKPGQAPRGLIGGTNKRAPWTPARFSGSLLGGKAALTITGAQAEDEADYYCALWYSNLWVFGGGTKLTVL

SEQ ID NO: 164 - protein, 125 aa, Artificial Sequence
  source: /note="Description of Artificial Sequence: Synthetic polypeptide"
EVQLVESGGGLVQPGGSLRLSCAASGFTFNTYAMNWVRQAPGKGLEWVGRIRSKYNNYATYYADSVKGRFTISRDDSKNTLYLQMNSLRAEDTAVYYCVRHGNFGNSYVSWFAYWGQGTLVTVSS

SEQ ID NO: 165 - protein, 109 aa, Artificial Sequence
  source: /note="Description of Artificial Sequence: Synthetic polypeptide"
QAVVTQEPSLTVSPGGTVTLTCGSSTGAVTTSNYANWVQQKPGQAPRGLIGGTNKRAPGVPARFSGSLLGGKAALTLSGAQPEDEAEYYCALWYSNLWVFGGGTKLTVL

SEQ ID NO: 166 - protein, 125 aa, Artificial Sequence
  source: /note="Description of Artificial Sequence: Synthetic polypeptide"
EVQLVESGGGLVQPGGSLRLSCAASGFTFSTYAMNWVRQAPGKGLEWVGRIRSKYNNYATYYADSVKGRFTISRDDSKNTLYLQMNSLRAEDTAVYYCVRHGNFGDSYVSWFAYWGQGTLVTVSS

SEQ ID NO: 167 - protein, 109 aa, Artificial Sequence
  source: /note="Description of Artificial Sequence: Synthetic polypeptide"
QAVVTQEPSLTVSPGGTVTLTCGSSTGAVTTSNYANWVQQKPGKSPRGLIGGTNKRAPGVPARFSGSLLGGKAALTISGAQPEDEADYYCALWYSNHWVFGGGTKLTVL

SEQ ID NO: 168 - protein, 101 aa, Artificial Sequence
  source: /note="Description of Artificial Sequence: Synthetic polypeptide"
DIQMTQSPSSLSASVGDRVTITCSASSSVSYMNWYQQTPGKAPKRWIYDTSKLASGVPSRFSGSGSGTDYTFTISSLQPEDIATYYCQQWSSNPFTFGQGT

SEQ ID NO: 169 - protein, 119 aa, Artificial Sequence
  source: /note="Description of Artificial Sequence: Synthetic polypeptide"
QVQLVQSGGGVVQPGRSLRLSCKASGYTFTRYTMHWVRQAPGKGLEWIGYINPSRGYTNYNQKVKDRFTISRDNSKNTAFLQMDSLRPEDTGVYFCARYYDDHYSLDYWGQGTPVTVSS

SEQ ID NO: 170 - protein, 122 aa, Artificial Sequence
  source: /note="Description of Artificial Sequence: Synthetic polypeptide"
EVQLQQSGPELVKPGASMKISCKASGYSFTGYTMNWVKQSHGKNLEWMGLINPYKGVSTYNQKFKDKATLTVDKSSSTAYMELLSLTSEDSAVYYCARSGYYGDSDWYFDVWGQGTTLTVFS

SEQ ID NO: 171 - protein, 107 aa, Artificial Sequence
  source: /note="Description of Artificial Sequence: Synthetic polypeptide"
DIQMTQTTSSLSASLGDRVTISCRASQDIRNYLNWYQQKPDGTVKLLIYYTSRLHSGVPSKFSGSGSGTDYSLTISNLEQEDIATYFCQQGNTLPWTFAGGTKLEIK

SEQ ID NO: 172 - protein, 125 aa, Artificial Sequence
  source: /note="Description of Artificial Sequence: Synthetic polypeptide"
EVQLVESGGGLVQPGGSLKLSCAASGFTFNTYAMNWVRQASGKGLEWVGRIRSKYNNYATYYADSVKDRFTISRDDSKSTLYLQMNSLKTEDTAVYYCVRHGNFGNSYVSWFAYWGQGTLVTVSS

SEQ ID NO: 173 - protein, 109 aa, Artificial Sequence
  source: /note="Description of Artificial Sequence: Synthetic polypeptide"
QAVVTQEPSLTVSPGGTVTLTCRSSTGAVTTSNYANWVQQKPGQAPRGLIGGTNKRAPWTPARFSGSLLGDKAALTLSGAQPEDEAEYFCALWYSNLWVFGGGTKLTVL

SEQ ID NO: 174 - protein, 254 aa, Artificial Sequence
  source: /note="Description of Artificial Sequence: Synthetic polypeptide"
EVQLVESGGGLVQPGGSLKLSCAASGFTFNTYAMNWVRQASGKGLEWVGRIRSKYNNYATYYADSVKDRFTISRDDSKSTLYLQMNSLKTEDTAVYYCVRHGNFGNSYVSWFAYWGQGTLVTVSSGGGGSGGGGSGGGGSGGGGSQAVVTQEPSLTVSPGGTVTLTCRSSTGAVTTSNYANWVQQKPGQAPRGLIGGTNKRAPWTPARFSGSLLGDKAALTLSGAQPEDEAEYFCALWYSNLWVFGGGTKLTVL

SEQ ID NO: 175 - protein, 254 aa, Artificial Sequence
  source: /note="Description of Artificial Sequence: Synthetic polypeptide"
EVQLVESGGGLVQPGGSLRLSCAASGFTFSTYAMNWVRQAPGKGLEWVGRIRSKYNNYATYYADSVKGRFTISRDDSKNTLYLQMNSLRAEDTAVYYCVRHGNFGDSYVSWFAYWGQGTLVTVSSGKPGSGKPGSGKPGSGKPGSQAVVTQEPSLTVSPGGTVTLTCGSSTGAVTTSNYANWVQQKPGKSPRGLIGGTNKRAPGVPARFSGSLLGGKAALTISGAQPEDEADYYCALWYSNHWVFGGGTKLTVL

SEQ ID NO: 176 - protein, 125 aa, Artificial Sequence
  source: /note="Description of Artificial Sequence: Synthetic polypeptide"
EVQLVESGGGLVQPGGSLRLSCAASGFTFSTYAMNWVRQAPGKGLEWVGRIRSKANNYATYYADSVKGRFTISRDDSKNTLYLQMNSLRAEDTAVYYCVRHGNFGDSYVSWFAYWGQGTLVTVSS

SEQ ID NO: 177 - protein, 254 aa, Artificial Sequence
  source: /note="Description of Artificial Sequence: Synthetic polypeptide"
EVQLVESGGGLVQPGGSLRLSCAASGFTFSTYAMNWVRQAPGKGLEWVGRIRSKANNYATYYADSVKGRFTISRDDSKNTLYLQMNSLRAEDTAVYYCVRHGNFGDSYVSWFAYWGQGTLVTVSSGKPGSGKPGSGKPGSGKPGSQAVVTQEPSLTVSPGGTVTLTCGSSTGAVTTSNYANWVQQKPGKSPRGLIGGTNKRAPGVPARFSGSLLGGKAALTISGAQPEDEADYYCALWYSNHWVFGGGTKLTVL

SEQ ID NO: 178 - protein, 125 aa, Artificial Sequence
  source: /note="Description of Artificial Sequence: Synthetic polypeptide"
EVQLVESGGGLVQPGGSLRLSCAASGFTFSTYAMNWVRQAPGKGLEWVGRIRSKYNNYATYYADSVKGRFTISRDDSKNTLYLQMNSLRAEDTAVYYCVRHGNFGDEYVSWFAYWGQGTLVTVSS

SEQ ID NO: 179 - protein, 254 aa, Artificial Sequence
  source: /note="Description of Artificial Sequence: Synthetic polypeptide"
EVQLVESGGGLVQPGGSLRLSCAASGFTFSTYAMNWVRQAPGKGLEWVGRIRSKYNNYATYYADSVKGRFTISRDDSKNTLYLQMNSLRAEDTAVYYCVRHGNFGDEYVSWFAYWGQGTLVTVSSGKPGSGKPGSGKPGSGKPGSQAVVTQEPSLTVSPGGTVTLTCGSSTGAVTTSNYANWVQQKPGKSPRGLIGGTNKRAPGVPARFSGSLLGGKAALTISGAQPEDEADYYCALWYSNHWVFGGGTKLTVL

SEQ ID NO: 180 - protein, 125 aa, Artificial Sequence
  source: /note="Description of Artificial Sequence: Synthetic polypeptide"
EVQLVESGGGLVQPGGSLRLSCAASGFTFSTYAMNWVRQAPGKGLEWVGRIRSKYNNYATYYADSVKGRFTISRDDSKNTLYLQMNSLRAEDTAVYYCVRHGNFGDPYVSWFAYWGQGTLVTVSS

SEQ ID NO: 181 - protein, 254 aa, Artificial Sequence
  source: /note="Description of Artificial Sequence: Synthetic polypeptide"
EVQLVESGGGLVQPGGSLRLSCAASGFTFSTYAMNWVRQAPGKGLEWVGRIRSKYNNYATYYADSVKGRFTISRDDSKNTLYLQMNSLRAEDTAVYYCVRHGNFGDPYVSWFAYWGQGTLVTVSSGKPGSGKPGSGKPGSGKPGSQAVVTQEPSLTVSPGGTVTLTCGSSTGAVTTSNYANWVQQKPGKSPRGLIGGTNKRAPGVPARFSGSLLGGKAALTISGAQPEDEADYYCALWYSNHWVFGGGTKLTVL

SEQ ID NO: 182 - protein, 125 aa, Artificial Sequence
  source: /note="Description of Artificial Sequence: Synthetic polypeptide"
EVQLVESGGGLVQPGGSLRLSCAASGFTFSTYAMNWVRQAPGKGLEWVGRIRSKYNNYATYYADSVKGRFTISRDDSKNTLYLQMNSLRAEDTAVYYCVRHGNFGDSYVSWFDYWGQGTLVTVSS

SEQ ID NO: 183 - protein, 254 aa, Artificial Sequence
  source: /note="Description of Artificial Sequence: Synthetic polypeptide"
EVQLVESGGGLVQPGGSLRLSCAASGFTFSTYAMNWVRQAPGKGLEWVGRIRSKYNNYATYYADSVKGRFTISRDDSKNTLYLQMNSLRAEDTAVYYCVRHGNFGDSYVSWFDYWGQGTLVTVSSGKPGSGKPGSGKPGSGKPGSQAVVTQEPSLTVSPGGTVTLTCGSSTGAVTTSNYANWVQQKPGKSPRGLIGGTNKRAPGVPARFSGSLLGGKAALTISGAQPEDEADYYCALWYSNHWVFGGGTKLTVL

SEQ ID NO: 184 - protein, 125 aa, Artificial Sequence
  source: /note="Description of Artificial Sequence: Synthetic polypeptide"
EVQLVESGGGLVQPGGSLRLSCAASGFTFSTYAMSWVRQAPGKGLEWVGRIRSKYNNYATYYADSVKGRFTISRDDSKNTLYLQMNSLRAEDTAVYYCVRHGNFGDSYVSWFAYWGQGTLVTVSS

SEQ ID NO: 185 - protein, 254 aa, Artificial Sequence
  source: /note="Description of Artificial Sequence: Synthetic polypeptide"
EVQLVESGGGLVQPGGSLRLSCAASGFTFSTYAMSWVRQAPGKGLEWVGRIRSKYNNYATYYADSVKGRFTISRDDSKNTLYLQMNSLRAEDTAVYYCVRHGNFGDSYVSWFAYWGQGTLVTVSSGKPGSGKPGSGKPGSGKPGSQAVVTQEPSLTVSPGGTVTLTCGSSTGAVTTSNYANWVQQKPGKSPRGLIGGTNKRAPGVPARFSGSLLGGKAALTISGAQPEDEADYYCALWYSNHWVFGGGTKLTVL

SEQ ID NO: 186 - protein, 257 aa, Artificial Sequence
  source: /note="Description of Artificial Sequence: Synthetic polypeptide"
EVQLVESGGGLVQPGGSLRLSCAASGFTFNTYAMNWVRQAPGKGLEWVGRIRSKYNNYATYYADSVKGRFTISRDDSKNTLYLQMNSLRAEDTAVYYCVRHGNFGNSYVSWFAYWGQGTLVTVSSGGGGSGGGGSGGGGSQAVVTQEPSLTVSPGGTVTLTCGSSTGAVTTSNYANWVQQKPGQAPRGLIGGTNKRAPGVPARFSGSLLGGKAALTLSGAQPEDEAEYYCALWYSNLWVFGGGTKLTVLGSHHHHHH

SEQ ID NO: 187 - protein, 125 aa, Artificial Sequence
  source: /note="Description of Artificial Sequence: Synthetic polypeptide"
EVQLVESGGGLVQPGGSLKLSCAASGFTFNTYAMNWVRQASGKGLEWVGRIRSKYNNYATYYADSVKDRFTISRDDSKNTAYLQMNSLKTEDTAVYYCVRHGNFGNSYVSWFAHWGQGTLVTVSS

SEQ ID NO: 188 - protein, 109 aa, Artificial Sequence
  source: /note="Description of Artificial Sequence: Synthetic polypeptide"
QAVVTQEPSLTVSPGGTVTLTCGSSTGAVTSSNYANWVQQKPGQAPRGLIGGTNKRAPWTPARFSGSLLGGKAALTLSGAQPEDEAEYYCALWYSNLWVFGGGTKLTVL

SEQ ID NO: 189 - protein, 254 aa, Artificial Sequence
  source: /note="Description of Artificial Sequence: Synthetic polypeptide"
EVQLVESGGGLVQPGGSLKLSCAASGFTFNTYAMNWVRQASGKGLEWVGRIRSKYNNYATYYADSVKDRFTISRDDSKNTAYLQMNSLKTEDTAVYYCVRHGNFGNSYVSWFAHWGQGTLVTVSSGGGGSGGGGSGGGGSGGGGSQAVVTQEPSLTVSPGGTVTLTCGSSTGAVTSSNYANWVQQKPGQAPRGLIGGTNKRAPWTPARFSGSLLGGKAALTLSGAQPEDEAEYYCALWYSNLWVFGGGTKLTVL

SEQ ID NO: 190 - protein, 125 aa, Artificial Sequence
  source: /note="Description of Artificial Sequence: Synthetic polypeptide"
EVQLVESGGGLVQPGGSLKLSCAASGFTFNTYAMNWVRQASGKGLEWVGRIRSKYNNYATYYADSVKDRFTISRDDSKSTAYLQMNSLKTEDTAVYYCVRHGNFGNSYVSWFAYWGQGTLVTVSS

SEQ ID NO: 191 - protein, 254 aa, Artificial Sequence
  source: /note="Description of Artificial Sequence: Synthetic polypeptide"
EVQLVESGGGLVQPGGSLKLSCAASGFTFNTYAMNWVRQASGKGLEWVGRIRSKYNNYATYYADSVKDRFTISRDDSKSTAYLQMNSLKTEDTAVYYCVRHGNFGNSYVSWFAYWGQGTLVTVSSGGGGSGGGGSGGGGSGGGGSQAVVTQEPSLTVSPGGTVTLTCRSSTGAVTTSNYANWVQQKPGQAPRGLIGGTNKRAPWTPARFSGSLLGDKAALTLSGAQPEDEAEYFCALWYSNLWVFGGGTKLTVL

SEQ ID NO: 192 - protein, 5 aa, Artificial Sequence
  source: /note="Description of Artificial Sequence: Synthetic peptide"
RYTMH

SEQ ID NO: 193 - protein, 10 aa, Artificial Sequence
  source: /note="Description of Artificial Sequence: Synthetic peptide"
SASSSVSYMN

SEQ ID NO: 194 - protein, 5 aa, Artificial Sequence
  source: /note="Description of Artificial Sequence: Synthetic peptide"
TYAMN

SEQ ID NO: 195 - protein, 14 aa, Artificial Sequence
  source: /note="Description of Artificial Sequence: Synthetic peptide"
RSSTGAVTTSNYAN

SEQ ID NO: 196 - protein, 5 aa, Artificial Sequence
  source: /note="Description of Artificial Sequence: Synthetic peptide"
SYTMH

SEQ ID NO: 197 - protein, 10 aa, Artificial Sequence
  source: /note="Description of Artificial Sequence: Synthetic peptide"
RASSSVSYMH

SEQ ID NO: 198 - protein, 10 aa, Artificial Sequence
  source: /note="Description of Artificial Sequence: Synthetic peptide"
RASSSVSYMN

SEQ ID NO: 199 - protein, 5 aa, Artificial Sequence
  source: /note="Description of Artificial Sequence: Synthetic peptide"
GYGMH

SEQ ID NO: 200 - protein, 11 aa, Artificial Sequence
  source: /note="Description of Artificial Sequence: Synthetic peptide"
RASQSVSSYLA

SEQ ID NO: 201 - protein, 5 aa, Artificial Sequence
  source: /note="Description of Artificial Sequence: Synthetic peptide"
SYAMN

SEQ ID NO: 202 - protein, 14 aa, Artificial Sequence
  source: /note="Description of Artificial Sequence: Synthetic peptide"
GSSTGAVTSGNYPN

SEQ ID NO: 203 - protein, 5 aa, Artificial Sequence
  source: /note="Description of Artificial Sequence: Synthetic peptide"
KYAMN

SEQ ID NO: 204 - protein, 14 aa, Artificial Sequence
  source: /note="Description of Artificial Sequence: Synthetic peptide"
GSSTGAVTTSNYAN

SEQ ID NO: 205 - protein, 5 aa, Artificial Sequence
  source: /note="Description of Artificial Sequence: Synthetic peptide"
GYTMN

SEQ ID NO: 206 - protein, 11 aa, Artificial Sequence
  source: /note="Description of Artificial Sequence: Synthetic peptide"
RASQDIRNYLN

SEQ ID NO: 207 - protein, 5 aa, Artificial Sequence
  source: /note="Description of Artificial Sequence: Synthetic peptide"
TYAMS

SEQ ID NO: 208 - protein, 5 aa, Artificial Sequence
  source: /note="Description of Artificial Sequence: Synthetic peptide"
TYAMH

SEQ ID NO: 209 - protein, 14 aa, Artificial Sequence
  source: /note="Description of Artificial Sequence: Synthetic peptide"
GSSTGAVTSSNYAN

SEQ ID NO: 210 - protein, 14 aa, Artificial Sequence
  source: /note="Description of Artificial Sequence: Synthetic peptide"
GSSTGAVTSGHYAN

SEQ ID NO: 211 - protein, 14 aa, Artificial Sequence
  source: /note="Description of Artificial Sequence: Synthetic peptide"
KSSTGAVTTSNYAN

SEQ ID NO: 212 - protein, 17 aa, Artificial Sequence
  source: /note="Description of Artificial Sequence: Synthetic peptide"
YINPSRGYTNYNQKFKD

SEQ ID NO: 213 - protein, 7 aa, Artificial Sequence
  source: /note="Description of Artificial Sequence: Synthetic peptide"
DTSKLAS

SEQ ID NO: 214 - protein, 19 aa, Artificial Sequence
  source: /note="Description of Artificial Sequence: Synthetic peptide"
RIRSKYNNYATYYADSVKD

SEQ ID NO: 215 - protein, 7 aa, Artificial Sequence
  source: /note="Description of Artificial Sequence: Synthetic peptide"
GTNKRAP

SEQ ID NO: 216 - protein, 17 aa, Artificial Sequence
  source: /note="Description of Artificial Sequence: Synthetic peptide"
YINPSSGYTKYNQKFKD

SEQ ID NO: 217 - protein, 7 aa, Artificial Sequence
  source: /note="Description of Artificial Sequence: Synthetic peptide"
ATSNLAS

SEQ ID NO: 218 - protein, 7 aa, Artificial Sequence
  source: /note="Description of Artificial Sequence: Synthetic peptide"
DTSKVAS

SEQ ID NO: 219 - protein, 17 aa, Artificial Sequence
  source: /note="Description of Artificial Sequence: Synthetic peptide"
YINPSRGYTNYNQKVKD

SEQ ID NO: 220 - protein, 17 aa, Artificial Sequence
  source: /note="Description of Artificial Sequence: Synthetic peptide"
VIWYDGSKKYYVDSVKG

SEQ ID NO: 221 - protein, 7 aa, Artificial Sequence
  source: /note="Description of Artificial Sequence: Synthetic peptide"
DASNRAT

SEQ ID NO: 222 - protein, 15 aa, Artificial Sequence
  source: /note="Description of Artificial Sequence: Synthetic peptide"
RIRSKYNNYATYYAD

SEQ ID NO: 223 - protein, 19 aa, Artificial Sequence
  source: /note="Description of Artificial Sequence: Synthetic peptide"
RIRSKYNNYATYYADSVKG

SEQ ID NO: 224 - protein, 7 aa, Artificial Sequence
  source: /note="Description of Artificial Sequence: Synthetic peptide"
GTKFLAP

SEQ ID NO: 225 - protein, 17 aa, Artificial Sequence
  source: /note="Description of Artificial Sequence: Synthetic peptide"
LINPYKGVSTYNQKFKD

SEQ ID NO: 226 - protein, 6 aa, Artificial Sequence
  source: /note="Description of Artificial Sequence: Synthetic peptide"
YTSRLH

SEQ ID NO: 227 - protein, 19 aa, Artificial Sequence
  source: /note="Description of Artificial Sequence: Synthetic peptide"
RIRSKANNYATYYADSVKG

SEQ ID NO: 228 - protein, 20 aa, Artificial Sequence
  source: /note="Description of Artificial Sequence: Synthetic peptide"
RIRSKANNYYATYYADSVKG

SEQ ID NO: 229 - protein, 19 aa, Artificial Sequence
  source: /note="Description of Artificial Sequence: Synthetic peptide"
RIRSKANSYATYYADSVKG

SEQ ID NO: 230 - protein, 19 aa, Artificial Sequence
  source: /note="Description of Artificial Sequence: Synthetic peptide"
RIRSKYNNYATAYADSVKG

SEQ ID NO: 231 - protein, 7 aa, Artificial Sequence
  source: /note="Description of Artificial Sequence: Synthetic peptide"
DTNKRAP

SEQ ID NO: 232 - protein, 7 aa, Artificial Sequence
  source: /note="Description of Artificial Sequence: Synthetic peptide"
GTNNRAP

SEQ ID NO: 233 - protein, 7 aa, Artificial Sequence
  source: /note="Description of Artificial Sequence: Synthetic peptide"
GTNKRAS

SEQ ID NO: 234 - protein, 7 aa, Artificial Sequence
  source: /note="Description of Artificial Sequence: Synthetic peptide"
GTSNKHS

SEQ ID NO: 235 - protein, 18 aa, Artificial Sequence
  source: /note="Description of Artificial Sequence: Synthetic peptide"
RIRSNGGYSTYYADSVKG

SEQ ID NO: 236 - protein, 10 aa, Artificial Sequence
  source: /note="Description of Artificial Sequence: Synthetic peptide"
YYDDHYCLDY

SEQ ID NO: 237 - protein, 9 aa, Artificial Sequence
  source: /note="Description of Artificial Sequence: Synthetic peptide"
QQWSSNPFT

SEQ ID NO: 238 - protein, 14 aa, Artificial Sequence
  source: /note="Description of Artificial Sequence: Synthetic peptide"
HGNFGNSYVSWFAY

SEQ ID NO: 239 - protein, 9 aa, Artificial Sequence
  source: /note="Description of Artificial Sequence: Synthetic peptide"
ALWYSNLWV

SEQ ID NO: 240 - protein, 10 aa, Artificial Sequence
  source: /note="Description of Artificial Sequence: Synthetic peptide"
WQDYDVYFDY

SEQ ID NO: 241 - protein, 9 aa, Artificial Sequence
  source: /note="Description of Artificial Sequence: Synthetic peptide"
QQWSSNPPT

SEQ ID NO: 242 - protein, 9 aa, Artificial Sequence
  source: /note="Description of Artificial Sequence: Synthetic peptide"
QQWSSNPLT

SEQ ID NO: 243 - protein, 9 aa, Artificial Sequence
  source: /note="Description of Artificial Sequence: Synthetic peptide"
QMGYWHFDL

SEQ ID NO: 244 - protein, 10 aa, Artificial Sequence
  source: /note="Description of Artificial Sequence: Synthetic peptide"
QQRSNWPPLT

SEQ ID NO: 245 - protein, 16 aa, Artificial Sequence
  source: /note="Description of Artificial Sequence: Synthetic peptide"
VRHGNFGNSYVSWFAY

SEQ ID NO: 246 - protein, 14 aa, Artificial Sequence
  source: /note="Description of Artificial Sequence: Synthetic peptide"
HGNFGNSYVSWWAY

SEQ ID NO: 247 - protein, 9 aa, Artificial Sequence
  source: /note="Description of Artificial Sequence: Synthetic peptide"
VLWYSNRWV

SEQ ID NO: 248 - protein, 14 aa, Artificial Sequence
  source: /note="Description of Artificial Sequence: Synthetic peptide"
HGNFGNSYISYWAY

SEQ ID NO: 249 - protein, 14 aa, Artificial Sequence
  source: /note="Description of Artificial Sequence: Synthetic peptide"
HGNFGDSYVSWFAY

SEQ ID NO: 250 - protein, 9 aa, Artificial Sequence
  source: /note="Description of Artificial Sequence: Synthetic peptide"
ALWYSNHWV

SEQ ID NO: 251 - protein, 10 aa, Artificial Sequence
  source: /note="Description of Artificial Sequence: Synthetic peptide"
YYDDHYSLDY

SEQ ID NO: 252 - protein, 13 aa, Artificial Sequence
  source: /note="Description of Artificial Sequence: Synthetic peptide"
SGYYGDSDWYFDV

SEQ ID NO: 253 - protein, 9 aa, Artificial Sequence
  source: /note="Description of Artificial Sequence: Synthetic peptide"
QQGNTLPWT

SEQ ID NO: 254 - protein, 14 aa, Artificial Sequence
  source: /note="Description of Artificial Sequence: Synthetic peptide"
HGNFGDEYVSWFAY

SEQ ID NO: 255 - protein, 14 aa, Artificial Sequence
  source: /note="Description of Artificial Sequence: Synthetic peptide"
HGNFGDPYVSWFAY

SEQ ID NO: 256 - protein, 14 aa, Artificial Sequence
  source: /note="Description of Artificial Sequence: Synthetic peptide"
HGNFGDSYVSWFDY

SEQ ID NO: 257 - protein, 14 aa, Artificial Sequence
  source: /note="Description of Artificial Sequence: Synthetic peptide"
HGNFGQSYVSWFAY

SEQ ID NO: 258 - protein, 14 aa, Artificial Sequence
  source: /note="Description of Artificial Sequence: Synthetic peptide"
HGNFGNSYVSWFDY

SEQ ID NO: 259 - protein, 9 aa, Artificial Sequence
  source: /note="Description of Artificial Sequence: Synthetic peptide"
LLWYSNLWV

SEQ ID NO: 260 - protein, 14 aa, Artificial Sequence
  source: /note="Description of Artificial Sequence: Synthetic peptide"
HGNFGNSYVSWFAH

SEQ ID NO: 261 - protein, 7 aa, Artificial Sequence
  source: /note="Description of Artificial Sequence: Synthetic peptide"
GYTFTRY

SEQ ID NO: 262 - protein, 6 aa, Artificial Sequence
  source: /note="Description of Artificial Sequence: Synthetic peptide"
SSSVSY

SEQ ID NO: 263 - protein, 7 aa, Artificial Sequence
  source: /note="Description of Artificial Sequence: Synthetic peptide"
GFTFNTY

SEQ ID NO: 264 - protein, 10 aa, Artificial Sequence
  source: /note="Description of Artificial Sequence: Synthetic peptide"
STGAVTTSNY

SEQ ID NO: 265 - protein, 7 aa, Artificial Sequence
  source: /note="Description of Artificial Sequence: Synthetic peptide"
GYTFTSY

SEQ ID NO: 266 - protein, 7 aa, Artificial Sequence
  source: /note="Description of Artificial Sequence: Synthetic peptide"
GFKFSGY

SEQ ID NO: 267 - protein, 7 aa, Artificial Sequence
  source: /note="Description of Artificial Sequence: Synthetic peptide"
SQSVSSY

SEQ ID NO: 268 - protein, 7 aa, Artificial Sequence
  source: /note="Description of Artificial Sequence: Synthetic peptide"
GFTFSTY

SEQ ID NO: 269 - protein, 7 aa, Artificial Sequence
  source: /note="Description of Artificial Sequence: Synthetic peptide"
GFTFNSY

SEQ ID NO: 270 - protein, 10 aa, Artificial Sequence
  source: /note="Description of Artificial Sequence: Synthetic peptide"
STGAVTSGNY

SEQ ID NO: 271 - protein, 7 aa, Artificial Sequence
  source: /note="Description of Artificial Sequence: Synthetic peptide"
GFTFNKY

SEQ ID NO: 272 - protein, 7 aa, Artificial Sequence
  source: /note="Description of Artificial Sequence: Synthetic peptide"
GYSFTGY

SEQ ID NO: 273 - protein, 7 aa, Artificial Sequence
  source: /note="Description of Artificial Sequence: Synthetic peptide"
SQDIRNY

SEQ ID NO: 274 - protein, 6 aa, Artificial Sequence
  source: /note="Description of Artificial Sequence: Synthetic peptide"
NPSRGY

SEQ ID NO: 275 - protein, 3 aa, Artificial Sequence
  source: /note="Description of Artificial Sequence: Synthetic peptide"
DTS

SEQ ID NO: 276 - protein, 8 aa, Artificial Sequence
  source: /note="Description of Artificial Sequence: Synthetic peptide"
RSKYNNYA

SEQ ID NO: 277 - protein, 3 aa, Artificial Sequence
  source: /note="Description of Artificial Sequence: Synthetic peptide"
GTN

SEQ ID NO: 278 - protein, 6 aa, Artificial Sequence
  source: /note="Description of Artificial Sequence: Synthetic peptide"
NPSSGY

SEQ ID NO: 279 - protein, 3 aa, Artificial Sequence
  source: /note="Description of Artificial Sequence: Synthetic peptide"
ATS

SEQ ID NO: 280 - protein, 6 aa, Artificial Sequence
  source: /note="Description of Artificial Sequence: Synthetic peptide"
WYDGSK

SEQ ID NO: 281 - protein, 3 aa, Artificial Sequence
  source: /note="Description of Artificial Sequence: Synthetic peptide"
DAS

SEQ ID NO: 282 - protein, 9 aa, Artificial Sequence
  source: /note="Description of Artificial Sequence: Synthetic peptide"
RSKYNNYAT

SEQ ID NO: 283 - protein, 3 aa, Artificial Sequence
  source: /note="Description of Artificial Sequence: Synthetic peptide"
GTK

SEQ ID NO: 284 - protein, 6 aa, Artificial Sequence
  source: /note="Description of Artificial Sequence: Synthetic peptide"
NPYKGV

SEQ ID NO: 285 - protein, 3 aa, Artificial Sequence
  source: /note="Description of Artificial Sequence: Synthetic peptide"
YTS

SEQ ID NO: 286 - protein, 6 aa, Artificial Sequence
  source: /note="Description of Artificial Sequence: Synthetic peptide"
WSSNPF

SEQ ID NO: 287 - protein, 6 aa, Artificial Sequence
  source: /note="Description of Artificial Sequence: Synthetic peptide"
WYSNLW

SEQ ID NO: 288 - protein, 6 aa, Artificial Sequence
  source: /note="Description of Artificial Sequence: Synthetic peptide"
WSSNPP

SEQ ID NO: 289 - protein, 6 aa, Artificial Sequence
  source: /note="Description of Artificial Sequence: Synthetic peptide"
WSSNPL

SEQ ID NO: 290 - protein, 7 aa, Artificial Sequence
  source: /note="Description of Artificial Sequence: Synthetic peptide"
RSNWPPL

SEQ ID NO: 291 - protein, 13 aa, Artificial Sequence
  source: /note="Description of Artificial Sequence: Synthetic peptide"
HGNFGNSYVSWFA

SEQ ID NO: 292 - protein, 6 aa, Artificial Sequence
  source: /note="Description of Artificial Sequence: Synthetic peptide"
WYSNRW

SEQ ID NO: 293 - protein, 6 aa, Artificial Sequence
  source: /note="Description of Artificial Sequence: Synthetic peptide"
WYSNHW

SEQ ID NO: 294 - protein, 6 aa, Artificial Sequence
  source: /note="Description of Artificial Sequence: Synthetic peptide"
GNTLPW

SEQ ID NO: 295 - protein, 10 aa, Artificial Sequence
  source: /note="Description of Artificial Sequence: Synthetic peptide"
GYTFTRYTMH

SEQ ID NO: 296 - protein, 10 aa, Artificial Sequence
  source: /note="Description of Artificial Sequence: Synthetic peptide"
GFTFNTYAMN

SEQ ID NO: 297 - protein, 10 aa, Artificial Sequence
  source: /note="Description of Artificial Sequence: Synthetic peptide"
GYTFTSYTMH

SEQ ID NO: 298 - protein, 10 aa, Artificial Sequence
  source: /note="Description of Artificial Sequence: Synthetic peptide"
GFKFSGYGMH

SEQ ID NO: 299 - protein, 10 aa, Artificial Sequence
  source: /note="Description of Artificial Sequence: Synthetic peptide"
GFTFSTYAMN

SEQ ID NO: 300 - protein, 10 aa, Artificial Sequence
  source: /note="Description of Artificial Sequence: Synthetic peptide"
GFTFNSYAMN

SEQ ID NO: 301 - protein, 10 aa, Artificial Sequence
  source: /note="Description of Artificial Sequence: Synthetic peptide"
GFTFNKYAMN

SEQ ID NO: 302 - protein, 10 aa, Artificial Sequence
  source: /note="Description of Artificial Sequence: Synthetic peptide"
GYSFTGYTMN

SEQ ID NO: 303 - protein, 18 aa, Artificial Sequence
  source: /note="Description of Artificial Sequence: Synthetic peptide"
RIRSKYNNYATYYADSVK

SEQ ID NO: 304 - protein, 7 aa, Artificial Sequence
  source: /note="Description of Artificial Sequence: Synthetic peptide"
YTSRLHS

SEQ ID NO: 305 - protein, 152 aa, Artificial Sequence
  source: /note="Description of Artificial Sequence: Synthetic polypeptide"
MQIFVKTLTGKTITLEVEPSDTIENVKAKIQDKEGIPPDQQWLWFAGKQLEDGRTLSDYNIQKESTLKLWLVDKAAMQIFVYTRTGKTITLEVEPSDTIENVKAKIQDKEGIPPDQQRLIWAGKQLEDGRTLSDYNIALESGLHLVLRLRAA

SEQ ID NO: 306 - protein, 13 aa, Artificial Sequence
  source: /note="Description of Artificial Sequence: Synthetic peptide"
KASGYKFTSYVMH

SEQ ID NO: 307 - protein, 16 aa, Artificial Sequence
  source: /note="Description of Artificial Sequence: Synthetic peptide"
YINPYNDVTKYNEKFK

SEQ ID NO: 308 - protein, 11 aa, Artificial Sequence
  source: /note="Description of Artificial Sequence: Synthetic peptide"
GSYYDYDGFVY

SEQ ID NO: 309 - protein, 10 aa, Artificial Sequence
  source: /note="Description of Artificial Sequence: Synthetic peptide"
SATSSVSYMH

SEQ ID NO: 310 - protein, 120 aa, Artificial Sequence
  source: /note="Description of Artificial Sequence: Synthetic polypeptide"
EVQLQQSGPELVKPGASVKMSCKASGYKFTSYVMHWVKQKPGQGLEWIGYINPYNDVTKYNEKFKGKATLTSDKSSSTAYMELSSLTSEDSAVHYCARGSYYDYDGFVYWGQGTLVTVSA

SEQ ID NO: 311 - protein, 106 aa, Artificial Sequence
  source: /note="Description of Artificial Sequence: Synthetic polypeptide"
QIVLTQSPAIMSASPGEKVTMTCSATSSVSYMHWYQQKSGTSPKRWIYDTSKLASGVPARFSGSGSGTSYSLTISSMEAEDAATYYCQQWSSNPLTFGAGTKLELK

SEQ ID NO: 312 - protein, 5 aa, Artificial Sequence
  source: /note="Description of Artificial Sequence: Synthetic peptide"
EYYMY

SEQ ID NO: 313 - protein, 17 aa, Artificial Sequence
  source: /note="Description of Artificial Sequence: Synthetic peptide"
RIDPEDGSIDYVEKFKK

SEQ ID NO: 314 - protein, 9 aa, Artificial Sequence
  source: /note="Description of Artificial Sequence: Synthetic peptide"
GKFNYRFAY

SEQ ID NO: 315 - protein, 16 aa, Artificial Sequence
  source: /note="Description of Artificial Sequence: Synthetic peptide"
RSSQSLLHSSGNTYLN

SEQ ID NO: 316 - protein, 7 aa, Artificial Sequence
  source: /note="Description of Artificial Sequence: Synthetic peptide"
LVSKLES

SEQ ID NO: 317 - protein, 8 aa, Artificial Sequence
  source: /note="Description of Artificial Sequence: Synthetic peptide"
QFTHYPYT

SEQ ID NO: 318 - protein, 118 aa, Artificial Sequence
  source: /note="Description of Artificial Sequence: Synthetic polypeptide"
EVQLQQSGPELQRPGASVKLSCKASGYIFTEYYMYWVKQRPKQGLELVGRIDPEDGSIDYVEKFKKKATLTADTSSNTAYMQLSSLTSEDTATYFCARGKFNYRFAYWGQGTLVTVSS

SEQ ID NO: 319 - protein, 112 aa, Artificial Sequence
  source: /note="Description of Artificial Sequence: Synthetic polypeptide"
DVVLTQTPPTLLATIGQSVSISCRSSQSLLHSSGNTYLNWLLQRTGQSPQPLIYLVSKLESGVPNRFSGSGSGTDFTLKISGVEAEDLGVYYCMQFTHYPYTFGAGTKLELK

SEQ ID NO: 320 - protein, 118 aa, Artificial Sequence
  source: /note="Description of Artificial Sequence: Synthetic polypeptide"
QVQLVQSGAEVKKPGASVKVSCKASGYTFTEYYMYWVRQAPGQGLELMGRIDPEDGSIDYVEKFKKKVTLTADTSSSTAYMELSSLTSDDTAVYYCARGKFNYRFAYWGQGTLVTVSS

SEQ ID NO: 321 - protein, 112 aa, Artificial Sequence
  source: /note="Description of Artificial Sequence: Synthetic polypeptide"
DVVMTQSPPSLLVTLGQPASISCRSSQSLLHSSGNTYLNWLLQRPGQSPQPLIYLVSKLESGVPDRFSGSGSGTDFTLKISGVEAEDVGVYYCMQFTHYPYTFGQGTKLEIK

SEQ ID NO: 322 - protein, 250 aa, Homo sapiens
MVAGSDAGRALGVLSVVCLLHCFGFISCFSQQIYGVVYGNVTFHVPSNVPLKEVLWKKQKDKVAELENSEFRAFSSFKNRVYLDTVSGSLTIYNLTSSDEDEYEMESPNITDTMKFFLYVLESLPSPTLTCALTNGSIEVQCMIPEHYNSHRGLIMYSWDCPMEQCKRNSTSIYFKMENDLPQKIQCTLSNPLFNTTSSIILTTCIPSSGHSRHRYALIPIPLAVITTCIVLYMNGILKCDRKPDRTNSN

SEQ ID NO: 323 - protein, 237 aa, Homo sapiens
MVAGSDAGRALGVLSVVCLLHCFGFISCFSQQIYGVVYGNVTFHVPSNVPLKEVLWKKQKDKVAELENSEFRAFSSFKNRVYLDTVSGSLTIYNLTSSDEDEYEMESPNITDTMKFFLYVLESLPSPTLTCALTNGSIEVQCMIPEHYNSHRGLIMYSWDCPMEQCKRNSTSIYFKMENDLPQKIQCTLSNPLFNTTSSIILTTCIPSSGHSRHRYALIPIPLAVITTCIVLYMNVL

SEQ ID NO: 324 - protein, 248 aa, Homo sapiens
MVAGSDAGRALGVLSVVCLLHCFGFISCFSQQIYGVVYGNVTFHVPSNVPLKEVLWKKQKDKVAELENSEFRAFSSFKNRVYLDTVSGSLTIYNLTSSDEDEYEMESPNITDTMKFFLYVLESLPSPTLTCALTNGSIEVQCMIPEHYNSHRGLIMYSWDCPMEQCKRNSTSIYFKMENDLPQKIQCTLSNPLFNTTSSIILTTCIPSSGHSRHRYALIPIPLAVITTCIVLYMNGILKCDRKPDRTK

SEQ ID NO: 325 - protein, 187 aa, Homo sapiens
FSQQIYGVVYGNVTFHVPSNVPLKEVLWKKQKDKVAELENSEFRAFSSFKNRVYLDTVSGSLTIYNLTSSDEDEYEMESPNITDTMKFFLYVLESLPSPTLTCALTNGSIEVQCMIPEHYNSHRGLIMYSWDCPMEQCKRNSTSIYFKMENDLPQKIQCTLSNPLFNTTSSIILTTCIPSSGHSRHR

SEQ ID NO: 326 - protein, 187 aa, Artificial Sequence; identical to SEQ ID NO: 325
  source: /note="Description of Artificial Sequence: Synthetic polypeptide"
  VARIANT (1)..(1): /replace="Ser"
  VARIANT (9)..(9): /replace="Lys"
  VARIANT (21)..(21): /replace="Gln"
  VARIANT (58)..(58): /replace="Lys"
  VARIANT (85)..(85): /replace="Ser"
  VARIANT (93)..(93): /replace="Gly"
  SITE (1)..(187): /note="Variant residues given in the sequence have no preference with respect to those in the annotations for variant positions"

SEQ ID NO: 327 - protein, 94 aa, Homo sapiens
SQQIYGVVYGNVTFHVPSNVPLKEVLWKKQKDKVAELENSEFRAFSSFKNRVYLDTVSGSLTIYNLTSSDEDEYEMESPNITDTMKFFLYVLES

SEQ ID NO: 328 - protein, 94 aa, Artificial Sequence; identical to SEQ ID NO: 327
  source: /note="Description of Artificial Sequence: Synthetic polypeptide"
  VARIANT (8)..(8): /replace="Lys"
  VARIANT (20)..(20): /replace="Gln"
  SITE (1)..(94): /note="Variant residues given in the sequence have no preference with respect to those in the annotations for variant positions"

SEQ ID NO: 329 - protein, 94 aa, Artificial Sequence
  source: /note="Description of Artificial Sequence: Synthetic polypeptide"
SQQIYGVVYGNVTFHCPSNVPLKEVLWKKQKDKVAELENSEFRAFSSFKNRVYLDTVSGSLTIYNLTSSDEDEYECESPNITDTMKFFLYVLES

SEQ ID NO: 330 - protein, 94 aa, Artificial Sequence
  source: /note="Description of Artificial Sequence: Synthetic polypeptide"
SQQIYGVVYGNVTFHVPSNVPLKECLWKKQKDKVAELENSEFRAFSSFKNRVYLDTVSCSLTIYNLTSSDEDEYEMESPNITDTMKFFLYVLES

SEQ ID NO: 331 - protein, 94 aa, Artificial Sequence
  source: /note="Description of Artificial Sequence: Synthetic polypeptide"
SQQIYGVVYGNVTFHCPSNVPLKEVLWKKQKDKVAELENSEFRAFSSFKNRVYLDTVSGSLTIYNLTSSDEDEYEMESPNITDTCKFFLYVLES

SEQ ID NO: 332 - protein, 94 aa, Artificial Sequence
  source: /note="Description of Artificial Sequence: Synthetic polypeptide"
SQQIYGVVYGNVTFHVPSNVPLKEVLCKKQKDKVAELENSEFRAFSSFKNRVYLDTVSGSCTIYNLTSSDEDEYEMESPNITDTMKFFLYVLES

SEQ ID NO: 333 - protein, 115 aa, Artificial Sequence
  source: /note="Description of Artificial Sequence: Synthetic polypeptide"
EVQLVESGGGLVQPGGSLRLSCAVSGFALSNHGMSWVRRAPGKGLEWVSGIVYSGSTYYAASVKGRFTISRDNSRNTLYLQMNSLRPEDTAIYYCSAHGGESDVWGQGTTVTVSS

SEQ ID NO: 334 - protein, 107 aa, Artificial Sequence
  source: /note="Description of Artificial Sequence: Synthetic polypeptide"
DIQLTQSPSSLSASVGDRVTITCRASQSISSYLNWYQQKPGKAPKLLIYAASSLQSGVPSRFSGSGSGTDFTLTISSLQPEDFATYYCQQSYSTPYTFGQGTKVEIK

SEQ ID NO: 335 - protein, 239 aa, Artificial Sequence
  source: /note="Description of Artificial Sequence: Synthetic polypeptide"
EVQLVESGGGLVQPGGSLRLSCAVSGFALSNHGMSWVRRAPGKGLEWVSGIVYSGSTYYAASVKGRFTISRDNSRNTLYLQMNSLRPEDTAIYYCSAHGGESDVWGQGTTVTVSSASGGGGSGGRASGGGGSDIQLTQSPSSLSASVGDRVTITCRASQSISSYLNWYQQKPGKAPKLLIYAASSLQSGVPSRFSGSGSGTDFTLTISSLQPEDFATYYCQQSYSTPYTFGQGTKVEIK

SEQ ID NO: 336 - protein, 120 aa, Artificial Sequence
  source: /note="Description of Artificial Sequence: Synthetic polypeptide"
QVQLVESGGGLVQPGRSLRLSCAASGFTFSNYAMSWVRQAPGKGLGWVSGISRSGENTYYADSVKGRFTISRDNSKNTLYLQMNSLRDEDTAVYYCARSPAHYYGGMDVWGQGTTVTVSS

SEQ ID NO: 337 - protein, 109 aa, Artificial Sequence
  source: /note="Description of Artificial Sequence: Synthetic polypeptide"
DIVLTQSPGTLSLSPGERATLSCRASQSISSSFLAWYQQKPGQAPRLLIYGASRRATGIPDRFSGSGSGTDFTLTISRLEPEDSAVYYCQQYHSSPSWTFGQGTKLEIK

SEQ ID NO: 338 - protein, 246 aa, Artificial Sequence
  source: /note="Description of Artificial Sequence: Synthetic polypeptide"
QVQLVESGGGLVQPGRSLRLSCAASGFTFSNYAMSWVRQAPGKGLGWVSGISRSGENTYYADSVKGRFTISRDNSKNTLYLQMNSLRDEDTAVYYCARSPAHYYGGMDVWGQGTTVTVSSASGGGGSGGRASGGGGSDIVLTQSPGTLSLSPGERATLSCRASQSISSSFLAWYQQKPGQAPRLLIYGASRRATGIPDRFSGSGSGTDFTLTISRLEPEDSAVYYCQQYHSSPSWTFGQGTKLEIK

SEQ ID NO: 339 - protein, 115 aa, Artificial Sequence
  source: /note="Description of Artificial Sequence: Synthetic polypeptide"
QVQLVESGGGLVQPGRSLRLSCAASGFTFDDYAMHWVRQAPGKGLEWVSGISWNSGSIGYADSVKGRFTISRDNAKNSLYLQMNSLRAEDTALYYCSVHSFLAYWGQGTLVTVSS

SEQ ID NO: 340 - protein, 112 aa, Artificial Sequence
  source: /note="Description of Artificial Sequence: Synthetic polypeptide"
DIVMTQTPLSLPVTPGEPASISCRSSQSLLHSNGYNYLDWYLQKPGQSPQLLIYLGSNRASGVPDRFSGSGSGTDFTLKISRVEAEDVGVYYCMQALQTPYTFGQGTKVEIK

SEQ ID NO: 341 - protein, 244 aa, Artificial Sequence
  source: /note="Description of Artificial Sequence: Synthetic polypeptide"
QVQLVESGGGLVQPGRSLRLSCAASGFTFDDYAMHWVRQAPGKGLEWVSGISWNSGSIGYADSVKGRFTISRDNAKNSLYLQMNSLRAEDTALYYCSVHSFLAYWGQGTLVTVSSASGGGGSGGRASGGGGSDIVMTQTPLSLPVTPGEPASISCRSSQSLLHSNGYNYLDWYLQKPGQSPQLLIYLGSNRASGVPDRFSGSGSGTDFTLKISRVEAEDVGVYYCMQALQTPYTFGQGTKVEIK

SEQ ID NO: 342 - protein, 115 aa, Artificial Sequence
  source: /note="Description of Artificial Sequence: Synthetic polypeptide"
EVQLLESGGGLVQPGGSLRLSCAVSGFALSNHGMSWVRRAPGKGLEWVSGIVYSGSTYYAASVKGRFTISRDNSRNTLYLQMNSLRPEDTAIYYCSAHGGESDVWGQGTTVTVSS

SEQ ID NO: 343 - protein, 111 aa, Artificial Sequence
  source: /note="Description of Artificial Sequence: Synthetic polypeptide"
DIVMTQTPLSLSVTPGQPASISCKSSQSLLRNDGKTPLYWYLQKAGQPPQLLIYEVSNRFSGVPDRFSGSGSGTDFTLKISRVEAEDVGAYYCMQNIQFPSFGGGTKLEIK

SEQ ID NO: 344 - protein, 243 aa, Artificial Sequence
  source: /note="Description of Artificial Sequence: Synthetic polypeptide"
EVQLLESGGGLVQPGGSLRLSCAVSGFALSNHGMSWVRRAPGKGLEWVSGIVYSGSTYYAASVKGRFTISRDNSRNTLYLQMNSLRPEDTAIYYCSAHGGESDVWGQGTTVTVSSASGGGGSGGRASGGGGSDIVMTQTPLSLSVTPGQPASISCKSSQSLLRNDGKTPLYWYLQKAGQPPQLLIYEVSNRFSGVPDRFSGSGSGTDFTLKISRVEAEDVGAYYCMQNIQFPSFGGGTKLEIK

SEQ ID NO: 345 - protein, 120 aa, Artificial Sequence
  source: /note="Description of Artificial Sequence: Synthetic polypeptide"
QVQLVQSGAEVRKTGASVKVSCKASGYIFDNFGINWVRQAPGQGLEWMGWINPKNNNTNYAQKFQGRVTITADESTNTAYMEVSSLRSEDTAVYYCARGPYYYQSYMDVWGQGTMVTVSS

SEQ ID NO: 346 - protein, 112 aa, Artificial Sequence
  source: /note="Description of Artificial Sequence: Synthetic polypeptide"
DIVMTQTPLSLPVTPGEPASISCRSSQSLLHSNGYNYLNWYLQKPGQSPQLLIYLGSKRASGVPDRFSGSGSGTDFTLHITRVGAEDVGVYYCMQALQTPYTFGQGTKLEIK

SEQ ID NO: 347 - protein, 249 aa, Artificial Sequence
  source: /note="Description of Artificial Sequence: Synthetic polypeptide"
QVQLVQSGAEVRKTGASVKVSCKASGYIFDNFGINWVRQAPGQGLEWMGWINPKNNNTNYAQKFQGRVTITADESTNTAYMEVSSLRSEDTAVYYCARGPYYYQSYMDVWGQGTMVTVSSASGGGGSGGRASGGGGSDIVMTQTPLSLPVTPGEPASISCRSSQSLLHSNGYNYLNWYLQKPGQSPQLLIYLGSKRASGVPDRFSGSGSGTDFTLHITRVGAEDVGVYYCMQALQTPYTFGQGTKLEIK

SEQ ID NO: 348 - protein, 123 aa, Artificial Sequence
  source: /note="Description of Artificial Sequence: Synthetic polypeptide"
QVQLQESGGGLVQPGGSLRLSCAASGFTFSSDAMTWVRQAPGKGLEWVSVISGSGGTTYYADSVKGRFTISRDNSKNTLYLQMNSLRAEDTAVYYCAKLDSSGYYYARGPRYWGQGTLVTVSS

SEQ ID NO: 349 - protein, 106 aa, Artificial Sequence
  source: /note="Description of Artificial Sequence: Synthetic polypeptide"
DIQLTQSPSSLSASVGDRVTITCRASQSISSYLNWYQQKPGKAPKLLIYGASTLASGVPARFSGSGSGTHFTLTINSLQSEDSATYYCQQSYKRASFGQGTKVEIK

SEQ ID NO: 350 - protein, 246 aa, Artificial Sequence
  source: /note="Description of Artificial Sequence: Synthetic polypeptide"
QVQLQESGGGLVQPGGSLRLSCAASGFTFSSDAMTWVRQAPGKGLEWVSVISGSGGTTYYADSVKGRFTISRDNSKNTLYLQMNSLRAEDTAVYYCAKLDSSGYYYARGPRYWGQGTLVTVSSASGGGGSGGRASGGGGSDIQLTQSPSSLSASVGDRVTITCRASQSISSYLNWYQQKPGKAPKLLIYGASTLASGVPARFSGSGSGTHFTLTINSLQSEDSATYYCQQSYKRASFGQGTKVEIK

SEQ ID NO: 351 - protein, 118 aa, Artificial Sequence
  source: /note="Description of Artificial Sequence: Synthetic polypeptide"
QVQLVQSGAEVKKPGASVKVSCKASGYTFSNYGITWVRQAPGQGLEWMGWISAYNGNTNYAQKFQGRVTMTRNTSISTAYMELSSLRSEDTAVYYCARGPYYYYMDVWGKGTMVTVSS

SEQ ID NO: 352 - protein, 112 aa, Artificial Sequence
  source: /note="Description of Artificial Sequence: Synthetic polypeptide"
EIVMTQSPLSLPVTPGEPASISCRSSQSLLYSNGYNYVDWYLQKPGQSPQLLIYLGSNRASGVPDRFSGSGSGTDFKLQISRVEAEDVGIYYCMQGRQFPYSFGQGTKVEIK

SEQ ID NO: 353 - protein, 247 aa, Artificial Sequence
  source: /note="Description of Artificial Sequence: Synthetic polypeptide"
QVQLVQSGAEVKKPGASVKVSCKASGYTFSNYGITWVRQAPGQGLEWMGWISAYNGNTNYAQKFQGRVTMTRNTSISTAYMELSSLRSEDTAVYYCARGPYYYYMDVWGKGTMVTVSSASGGGGSGGRASGGGGSEIVMTQSPLSLPVTPGEPASISCRSSQSLLYSNGYNYVDWYLQKPGQSPQLLIYLGSNRASGVPDRFSGSGSGTDFKLQISRVEAEDVGIYYCMQGRQFPYSFGQGTKVEIK

SEQ ID NO: 354 - protein, 115 aa, Artificial Sequence
  source: /note="Description of Artificial Sequence: Synthetic polypeptide"
EVQLLETGGGLVQPGGSLRLSCAVSGFALSNHGMSWVRRAPGKGLEWVSGIVYSGSTYYAASVKGRFTISRDNSRNTLYLQMNSLRPEDTAIYYCSAHGGESDVWGQGTTVTVSS

SEQ ID NO: 355 - protein, 106 aa, Artificial Sequence
  source: /note="Description of Artificial Sequence: Synthetic polypeptide"
EIVLTQSPATLSVSPGESATLSCRASQSVSSNLAWYQQKPGQAPRLLIYGASTRASGIPDRFSGSGSGTDFTLTISSLQAEDVAVYYCQQYGSSLTFGGGTKVEIK

SEQ ID NO: 356 - protein, 238 aa, Artificial Sequence
  source: /note="Description of Artificial Sequence: Synthetic polypeptide"
EVQLLETGGGLVQPGGSLRLSCAVSGFALSNHGMSWVRRAPGKGLEWVSGIVYSGSTYYAASVKGRFTISRDNSRNTLYLQMNSLRPEDTAIYYCSAHGGESDVWGQGTTVTVSSASGGGGSGGRASGGGGSEIVLTQSPATLSVSPGESATLSCRASQSVSSNLAWYQQKPGQAPRLLIYGASTRASGIPDRFSGSGSGTDFTLTISSLQAEDVAVYYCQQYGSSLTFGGGTKVEIK

SEQ ID NO: 357 - protein, 115 aa, Artificial Sequence
  source: /note="Description of Artificial Sequence: Synthetic polypeptide"
EVQLVETGGGLVQPGGSLRLSCAVSGFALSNHGMSWVRRAPGKGLEWVSGIVYSGSTYYAASVKGRFTISRDNSRNTLYLQMNSLRPEDTAIYYCSAHGGESDVWGQGTTVTVSS

SEQ ID NO: 358 - protein, 107 aa, Artificial Sequence
  source: /note="Description of Artificial Sequence: Synthetic polypeptide"
EIVMTQSPATLSVSPGERATLSCRASQSVSSKLAWYQQKPGQAPRLLMYGASIRATGIPDRFSGSGSGTEFTLTISSLEPEDFAVYYCQQYGSSSWTFGQGTKVEIK

SEQ ID NO: 359 - protein, 239 aa, Artificial Sequence
  source: /note="Description of Artificial Sequence: Synthetic polypeptide"
EVQLVETGGGLVQPGGSLRLSCAVSGFALSNHGMSWVRRAPGKGLEWVSGIVYSGSTYYAASVKGRFTISRDNSRNTLYLQMNSLRPEDTAIYYCSAHGGESDVWGQGTTVTVSSASGGGGSGGRASGGGGSEIVMTQSPATLSVSPGERATLSCRASQSVSSKLAWYQQKPGQAPRLLMYGASIRATGIPDRFSGSGSGTEFTLTISSLEPEDFAVYYCQQYGSSSWTFGQGTKVEIK

SEQ ID NO: 360 - protein, 115 aa, Artificial Sequence
  source: /note="Description of Artificial Sequence: Synthetic polypeptide"
EVQLVETGGGVVQPGGSLRLSCAVSGFALSNHGMSWVRRAPGKGLEWVSGIVYSGSTYYAASVKGRFTISRDNSRNTLYLQMNSLRPEDTAIYYCSAHGGESDVWGQGTTVTVSS

SEQ ID NO: 361 - protein, 109 aa, Artificial Sequence
  source: /note="Description of Artificial Sequence: Synthetic polypeptide"
EIVLTQSPGTLSLSPGERATLSCRASQSVGSTNLAWYQQKPGQAPRLLIYDASNRATGIPDRFSGGGSGTDFTLTISRLEPEDFAVYYCQQYGSSPPWTFGQGTKVEIK

SEQ ID NO: 362 - protein, 241 aa, Artificial Sequence
  source: /note="Description of Artificial Sequence: Synthetic polypeptide"
EVQLVETGGGVVQPGGSLRLSCAVSGFALSNHGMSWVRRAPGKGLEWVSGIVYSGSTYYAASVKGRFTISRDNSRNTLYLQMNSLRPEDTAIYYCSAHGGESDVWGQGTTVTVSSASGGGGSGGRASGGGGSEIVLTQSPGTLSLSPGERATLSCRASQSVGSTNLAWYQQKPGQAPRLLIYDASNRATGIPDRFSGGGSGTDFTLTISRLEPEDFAVYYCQQYGSSPPWTFGQGTKVEIK

SEQ ID NO: 363 - protein, 117 aa, Artificial Sequence
  source: /note="Description of Artificial Sequence: Synthetic polypeptide"
QVQLVESGGGLVKPGGSLRLSCAASGFTFSDYYMSWIRQAPGKGLEWVSYISSSGSTIYYADSVKGRFTISRDNAKNSLYLQMNSLRAEDTAVYYCARESGDGMDVWGQGTTVTVSS

SEQ ID NO: 364 - protein, 105 aa, Artificial Sequence
  source: /note="Description of Artificial Sequence: Synthetic polypeptide"
DIQMTQSPSSLSASVGDRVTITCRASQSISSYLNWYQQKPGKAPKLLIYAASSLQSGVPSRFSGSGSGTDFTLTISSLQPEDFATYYCQQSYTLAFGQGTKVDIK

SEQ ID NO: 365 - protein, 239 aa, Artificial Sequence
  source: /note="Description of Artificial Sequence: Synthetic polypeptide"
QVQLVESGGGLVKPGGSLRLSCAASGFTFSDYYMSWIRQAPGKGLEWVSYISSSGSTIYYADSVKGRFTISRDNAKNSLYLQMNSLRAEDTAVYYCARESGDGMDVWGQGTTVTVSSASGGGGSGGRASGGGGSDIQMTQSPSSLSASVGDRVTITCRASQSISSYLNWYQQKPGKAPKLLIYAASSLQSGVPSRFSGSGSGTDFTLTISSLQPEDFATYYCQQSYTLAFGQGTKVDIK

SEQ ID NO: 366 - protein, 117 aa, Artificial Sequence
  source: /note="Description of Artificial Sequence: Synthetic polypeptide"
QVQLVQSGGGLVKPGGSLRLSCAASGFTFSDYYMSWIRQAPGKGLEWVSYISSSGNTIYYADSVKGRFTISRDNAKNSLYLQMNSLRAEDTAVYYCARSTMVREDYWGQGTLVTVSS

SEQ ID NO: 367 - protein, 112 aa, Artificial Sequence
  source: /note="Description of Artificial Sequence: Synthetic polypeptide"
DIVLTQSPLSLPVTLGQPASISCKSSESLVHNSGKTYLNWFHQRPGQSPRRLIYEVSNRDSGVPDRFTGSGSGTDFTLKISRVEAEDVGVYYCMQGTHWPGTFGQGTKLEIK

SEQ ID NO: 368 - protein, 246 aa, Artificial Sequence
  source: /note="Description of Artificial Sequence: Synthetic polypeptide"
QVQLVQSGGGLVKPGGSLRLSCAASGFTFSDYYMSWIRQAPGKGLEWVSYISSSGNTIYYADSVKGRFTISRDNAKNSLYLQMNSLRAEDTAVYYCARSTMVREDYWGQGTLVTVSSASGGGGSGGRASGGGGSDIVLTQSPLSLPVTLGQPASISCKSSESLVHNSGKTYLNWFHQRPGQSPRRLIYEVSNRDSGVPDRFTGSGSGTDFTLKISRVEAEDVGVYYCMQGTHWPGTFGQGTKLEIK

SEQ ID NO: 369 - protein, 115 aa, Artificial Sequence
  source: /note="Description of Artificial Sequence: Synthetic polypeptide"
QVQLVESGGGLVQPGGSLRLSCAVSGFALSNHGMSWVRRAPGKGLEWVSGIVYSGSTYYAASVKGRFTISRDNSRNTLYLQMNSLRPEDTAIYYCSAHGGESDVWGQGTTVTVSS

SEQ ID NO: 370 - protein, 107 aa, Artificial Sequence
  source: /note="Description of Artificial Sequence: Synthetic polypeptide"
DIRLTQSPSPLSASVGDRVTITCQASEDINKFLNWYHQTPGKAPKLLIYDASTLQTGVPSRFSGSGSGTDFTLTINSLQPEDIGTYYCQQYESLPLTFGGGTKVEIK

SEQ ID NO: 371 - protein, 239 aa, Artificial Sequence
  source: /note="Description of Artificial Sequence: Synthetic polypeptide"
QVQLVESGGGLVQPGGSLRLSCAVSGFALSNHGMSWVRRAPGKGLEWVSGIVYSGSTYYAASVKGRFTISRDNSRNTLYLQMNSLRPEDTAIYYCSAHGGESDVWGQGTTVTVSSASGGGGSGGRASGGGGSDIRLTQSPSPLSASVGDRVTITCQASEDINKFLNWYHQTPGKAPKLLIYDASTLQTGVPSRFSGSGSGTDFTLTINSLQPEDIGTYYCQQYESLPLTFGGGTKVEIK

SEQ ID NO: 372 - protein, 108 aa, Artificial Sequence
  source: /note="Description of Artificial Sequence: Synthetic polypeptide"
ETTLTQSPATLSVSPGERATLSCRASQSVGSNLAWYQQKPGQGPRLLIYGASTRATGIPARFSGSGSGTEFTLTISSLQPEDFAVYYCQQYNDWLPVTFGQGTKVEIK

SEQ ID NO: 373 - protein, 240 aa, Artificial Sequence
  source: /note="Description of Artificial Sequence: Synthetic polypeptide"
EVQLVETGGGLVQPGGSLRLSCAVSGFALSNHGMSWVRRAPGKGLEWVSGIVYSGSTYYAASVKGRFTISRDNSRNTLYLQMNSLRPEDTAIYYCSAHGGESDVWGQGTTVTVSSASGGGGSGGRASGGGGSETTLTQSPATLSVSPGERATLSCRASQSVGSNLAWYQQKPGQGPRLLIYGASTRATGIPARFSGSGSGTEFTLTISSLQPEDFAVYYCQQYNDWLPVTFGQGTKVEIK

SEQ ID NO: 374 - protein, 109 aa, Artificial Sequence
  source: /note="Description of Artificial Sequence: Synthetic polypeptide"
EIVLTQSPGTLSLSPGERATLSCRASQSIGSSSLAWYQQKPGQAPRLLMYGASSRASGIPDRFSGSGSGTDFTLTISRLEPEDFAVYYCQQYAGSPPFTFGQGTKVEIK

SEQ ID NO: 375 - protein, 241 aa, Artificial Sequence
  source: /note="Description of Artificial Sequence: Synthetic polypeptide"
EVQLVESGGGLVQPGGSLRLSCAVSGFALSNHGMSWVRRAPGKGLEWVSGIVYSGSTYYAASVKGRFTISRDNSRNTLYLQMNSLRPEDTAIYYCSAHGGESDVWGQGTTVTVSSASGGGGSGGRASGGGGSEIVLTQSPGTLSLSPGERATLSCRASQSIGSSSLAWYQQKPGQAPRLLMYGASSRASGIPDRFSGSGSGTDFTLTISRLEPEDFAVYYCQQYAGSPPFTFGQGTKVEIK

SEQ ID NO: 376 - protein, 121 aa, Artificial Sequence
  source: /note="Description of Artificial Sequence: Synthetic polypeptide"
QVQLQESGPGLVKPSETLSLTCTVSGGSISSSYYYWGWIRQPPGKGLEWIGSIYYSGSAYYNPSLKSRVTISVDTSKNQFSLRLSSVTAADTAVYYCARHWQEWPDAFDIWGQGTMVTVSS

SEQ ID NO: 377 - protein, 107 aa, Artificial Sequence
  source: /note="Description of Artificial Sequence: Synthetic polypeptide"
ETTLTQSPAFMSATPGDKVIISCKASQDIDDAMNWYQQKPGEAPLFIIQSATSPVPGIPPRFSGSGFGTDFSLTINNIESEDAAYYFCLQHDNFPLTFGQGTKLEIK

SEQ ID NO: 378 - protein, 243 aa, Artificial Sequence
  source: /note="Description of Artificial Sequence: Synthetic polypeptide"
QVQLQESGPGLVKPSETLSLTCTVSGGSISSSYYYWGWIRQPPGKGLEWIGSIYYSGSAYYNPSLKSRVTISVDTSKNQFSLRLSSVTAADTAVYYCARHWQEWPDAFDIWGQGTMVTVSSGGGGSGGGGSGGGGSETTLTQSPAFMSATPGDKVIISCKASQDIDDAMNWYQQKPGEAPLFIIQSATSPVPGIPPRFSGSGFGTDFSLTINNIESEDAAYYFCLQHDNFPLTFGQGTKLEIK

SEQ ID NO: 379 - protein, 123 aa, Artificial Sequence
  source: /note="Description of Artificial Sequence: Synthetic polypeptide"
QVNLRESGPALVKPTQTLTLTCTFSGFSLRTSGMCVSWIRQPPGKALEWLARIDWDEDKFYSTSLKTRLTISKDTSDNQVVLRMTNMDPADTATYYCARSGAGGTSATAFDIWGPGTMVTVSS

SEQ ID NO: 380 - protein, 107 aa, Artificial Sequence
  source: /note="Description of Artificial Sequence: Synthetic polypeptide"
DIQMTQSPSSLSASVGDRVTITCRASQDIYNNLAWFQLKPGSAPRSLMYAANKSQSGVPSRFSGSASGTDFTLTISSLQPEDFATYYCQHYYRFPYSFGQGTKLEIK

SEQ ID NO: 381 - protein, 244 aa, Artificial Sequence
  source: /note="Description of Artificial Sequence: Synthetic polypeptide"
VNLRESGPALVKPTQTLTLTCTFSGFSLRTSGMCVSWIRQPPGKALEWLARIDWDEDKFYSTSLKTRLTISKDTSDNQVVLRMTNMDPADTATYYCARSGAGGTSATAFDIWGPGTMVTVSSGGGGSGGGGSGGGGSDIQMTQSPSSLSASVGDRVTITCRASQDIYNNLAWFQLKPGSAPRSLMYAANKSQSGVPSRFSGSASGTDFTLTISSLQPEDFATYYCQHYYRFPYSFGQGTKLEIK

SEQ ID NO: 382 - protein, 119 aa, Artificial Sequence
  source: /note="Description of Artificial Sequence: Synthetic polypeptide"
EVQLVESGGGLVKPGGSLRLSCAASGFTFSSYSMNWVRQAPGKGLEWVSSISSSSSYIYYADSVKGRFTISRDNAKNSLYLQMNSLRAEDTAVYYCAKTIAAVYAFDIWGQGTTVTVSS

SEQ ID NO: 383 - protein, 112 aa, Artificial Sequence
  source: /note="Description of Artificial Sequence: Synthetic polypeptide"
EIVLTQSPLSLPVTPEEPASISCRSSQSLLHSNGYNYLDWYLQKPGQSPQLLIYLGSNRASGVPDRFSGSGSGTDFTLKISRVEAEDVGVYYCMQALQTPYTFGQGTKLEIK

SEQ ID NO: 384 - protein, 246 aa, Artificial Sequence
  source: /note="Description of Artificial Sequence: Synthetic polypeptide"
EVQLVESGGGLVKPGGSLRLSCAASGFTFSSYSMNWVRQAPGKGLEWVSSISSSSSYIYYADSVKGRFTISRDNAKNSLYLQMNSLRAEDTAVYYCAKTIAAVYAFDIWGQGTTVTVSSGGGGSGGGGSGGGGSEIVLTQSPLSLPVTPEEPASISCRSSQSLLHSNGYNYLDWYLQKPGQSPQLLIYLGSNRASGVPDRFSGSGSGTDFTLKISRVEAEDVGVYYCMQALQTPYTFGQGTKLEIK

SEQ ID NO: 385 - protein, 117 aa, Artificial Sequence
  source: /note="Description of Artificial Sequence: Synthetic polypeptide"
EVQLVESGGGLVKPGGSLRLSCAASGFTFSDYYMSWIRQAPGKGLEWVSYISSSGSTIYYADSVKGRFTISRDNAKNSLYLQMNSLRAEDTAVYYCARDLRGAFDIWGQGTMVTVSS

SEQ ID NO: 386 - protein, 108 aa, Artificial Sequence
  source: /note="Description of Artificial Sequence: Synthetic polypeptide"
SYVLTQSPSVSAAPGYTATISCGGNNIGTKSVHWYQQKPGQAPLLVIRDDSVRPSKIPGRFSGSNSGNMATLTISGVQAGDEADFYCQVWDSDSEHVVFGGGTKLTVL

SEQ ID NO: 387 - protein, 240 aa, Artificial Sequence
  source: /note="Description of Artificial Sequence: Synthetic polypeptide"
EVQLVESGGGLVKPGGSLRLSCAASGFTFSDYYMSWIRQAPGKGLEWVSYISSSGSTIYYADSVKGRFTISRDNAKNSLYLQMNSLRAEDTAVYYCARDLRGAFDIWGQGTMVTVSSGGGGSGGGGSGGGGSSYVLTQSPSVSAAPGYTATISCGGNNIGTKSVHWYQQKPGQAPLLVIRDDSVRPSKIPGRFSGSNSGNMATLTISGVQAGDEADFYCQVWDSDSEHVVFGGGTKLTVL

SEQ ID NO: 388 - protein, 120 aa, Artificial Sequence
  source: /note="Description of Artificial Sequence: Synthetic polypeptide"
QVQLVQSGAEVKKPGASVKVSCKPSGYTVTSHYIHWVRRAPGQGLEWMGMINPSGGVTAYSQTLQGRVTMTSDTSSSTVYMELSSLRSEDTAMYYCAREGSGSGWYFDFWGRGTLVTVSS

SEQ ID NO: 389 - protein, 106 aa, Artificial Sequence
  source: /note="Description of Artificial Sequence: Synthetic polypeptide"
SYVLTQPPSVSVSPGQTASITCSGDGLSKKYVSWYQQKAGQSPVVLISRDKERPSGIPDRFSGSNSADTATLTISGTQAMDEADYYCQAWDDTTVVFGGGTKLTVL

SEQ ID NO: 390 - protein, 241 aa, Artificial Sequence
  source: /note="Description of Artificial Sequence: Synthetic polypeptide"
QVQLVQSGAEVKKPGASVKVSCKPSGYTVTSHYIHWVRRAPGQGLEWMGMINPSGGVTAYSQTLQGRVTMTSDTSSSTVYMELSSLRSEDTAMYYCAREGSGSGWYFDFWGRGTLVTVSSGGGGSGGGGSGGGGSSYVLTQPPSVSVSPGQTASITCSGDGLSKKYVSWYQQKAGQSPVVLISRDKERPSGIPDRFSGSNSADTATLTISGTQAMDEADYYCQAWDDTTVVFGGGTKLTVL

SEQ ID NO: 391 - protein, 123 aa, Artificial Sequence
  source: /note="Description of Artificial Sequence: Synthetic polypeptide"
QVQLQESGPGLVKPSQTLSLTCTVSGGSISSGGYYWSWIRQHPGKGLEWIGYIYYSGSTYYNPSLKSRVTISVDTSKNQFSLKLSSVTAADTAVYYCARAGIAARLRGAFDIWGQGTMVTVSS

SEQ ID NO: 392 - protein, 107 aa, Artificial Sequence
  source: /note="Description of Artificial Sequence: Synthetic polypeptide"
DIVMTQSPSSVSASVGDRVIITCRASQGIRNWLAWYQQKPGKAPNLLIYAASNLQSGVPSRFSGSGSGADFTLTISSLQPEDVATYYCQKYNSAPFTFGPGTKVDIK

SEQ ID NO: 393 - protein, 245 aa, Artificial Sequence
  source: /note="Description of Artificial Sequence: Synthetic polypeptide"
QVQLQESGPGLVKPSQTLSLTCTVSGGSISSGGYYWSWIRQHPGKGLEWIGYIYYSGSTYYNPSLKSRVTISVDTSKNQFSLKLSSVTAADTAVYYCARAGIAARLRGAFDIWGQGTMVTVSSGGGGSGGGGSGGGGSDIVMTQSPSSVSASVGDRVIITCRASQGIRNWLAWYQQKPGKAPNLLIYAASNLQSGVPSRFSGSGSGADFTLTISSLQPEDVATYYCQKYNSAPFTFGPGTKVDIK

SEQ ID NO: 394 - protein, 129 aa, Artificial Sequence
  source: /note="Description of Artificial Sequence: Synthetic polypeptide"
QVQLVQSGAEVKKPGSSVKVSCKASGGTFSSYAISWVRQAPGQGLEWMGGIIPIFGTANYAQKFQGRVTITADESTSTAYMELSSLRSEDTAVYYCARRGGYQLLRWDVGLLRSAFDIWGQGTMVTVSS

SEQ ID NO: 395 - protein, 109 aa, Artificial Sequence
  source: /note="Description of Artificial Sequence: Synthetic polypeptide"
SYVLTQPPSVSVAPGQTARITCGGNNIGSKSVHWYQQKPGQAPVLVLYGKNNRPSGVPDRFSGSRSGTTASLTITGAQAEDEADYYCSSRDSSGDHLRVFGTGTKVTVL

SEQ ID NO: 396 - protein, 253 aa, Artificial Sequence
  source: /note="Description of Artificial Sequence: Synthetic polypeptide"
QVQLVQSGAEVKKPGSSVKVSCKASGGTFSSYAISWVRQAPGQGLEWMGGIIPIFGTANYAQKFQGRVTITADESTSTAYMELSSLRSEDTAVYYCARRGGYQLLRWDVGLLRSAFDIWGQGTMVTVSSGGGGSGGGGSGGGGSSYVLTQPPSVSVAPGQTARITCGGNNIGSKSVHWYQQKPGQAPVLVLYGKNNRPSGVPDRFSGSRSGTTASLTITGAQAEDEADYYCSSRDSSGDHLRVFGTGTKVTVL

SEQ ID NO: 397 - protein, 125 aa, Artificial Sequence
  source: /note="Description of Artificial Sequence: Synthetic polypeptide"
EVQLQQSGPGLVKPSQTLSLTCAISGDSVSSNSAAWNWIRQSPSRGLEWLGRTYYRSKWYSFYAISLKSRIIINPDTSKNQFSLQLKSVTPEDTAVYYCARSSPEGLFLYWFDPWGQGTLVTVSS

SEQ ID NO: 398 - protein, 108 aa, Artificial Sequence
  source: /note="Description of Artificial Sequence: Synthetic polypeptide"
SSELTQDPAVSVALGQTIRITCQGDSLGNYYATWYQQKPGQAPVLVIYGTNNRPSGIPDRFSASSSGNTASLTITGAQAEDEADYYCNSRDSSGHHLLFGTGTKVTVL

SEQ ID NO: 399 - protein, 248 aa, Artificial Sequence
  source: /note="Description of Artificial Sequence: Synthetic polypeptide"
EVQLQQSGPGLVKPSQTLSLTCAISGDSVSSNSAAWNWIRQSPSRGLEWLGRTYYRSKWYSFYAISLKSRIIINPDTSKNQFSLQLKSVTPEDTAVYYCARSSPEGLFLYWFDPWGQGTLVTVSSGGDGSGGGGSGGGGSSSELTQDPAVSVALGQTIRITCQGDSLGNYYATWYQQKPGQAPVLVIYGTNNRPSGIPDRFSASSSGNTASLTITGAQAEDEADYYCNSRDSSGHHLLFGTGTKVTVL

SEQ ID NO: 400 - protein, 118 aa, Artificial Sequence
  source: /note="Description of Artificial Sequence: Synthetic polypeptide"
EVQLVESGGGLVQPGGSLRLSCAASGFTFSSYAMSWVRQAPGKGLEWVSAISGSGGSTYYADSVKGRFTISRDNSKNTLYLQMNSLRAEDTAVYYCAKVEGSGSLDYWGQGTLVTVSS

SEQ ID NO: 401 - protein, 113 aa, Artificial Sequence
  source: /note="Description of Artificial Sequence: Synthetic polypeptide"
EIVMTQSPGTLSLSPGERATLSCRASQSVSSAYLAWYQQKPGQPPRLLISGASTRATGIPDRFGGSGSGTDFTLTISRLEPEDFAVYYCQHYGSSFNGSSLFTFGQGTRLEIK

SEQ ID NO: 402 - protein, 246 aa, Artificial Sequence
  source: /note="Description of Artificial Sequence: Synthetic polypeptide"
EVQLVESGGGLVQPGGSLRLSCAASGFTFSSYAMSWVRQAPGKGLEWVSAISGSGGSTYYADSVKGRFTISRDNSKNTLYLQMNSLRAEDTAVYYCAKVEGSGSLDYWGQGTLVTVSSGGGGSGGGGSGGGGSEIVMTQSPGTLSLSPGERATLSCRASQSVSSAYLAWYQQKPGQPPRLLISGASTRATGIPDRFGGSGSGTDFTLTISRLEPEDFAVYYCQHYGSSFNGSSLFTFGQGTRLEIK

SEQ ID NO: 403 - protein, 118 aa, Artificial Sequence
  source: /note="Description of Artificial Sequence: Synthetic polypeptide"
EVQLVETGGGLVQPGGSLRLSCAASGITFSRYPMSWVRQAPGKGLEWVSGISDSGVSTYYADSAKGRFTISRDNSKNTLFLQMSSLRDEDTAVYYCVTRAGSEASDIWGQGTMVTVSS

SEQ ID NO: 404 - protein, 108 aa, Artificial Sequence
  source: /note="Description of Artificial Sequence: Synthetic polypeptide"
EIVLTQSPATLSLSPGERATLSCRASQSVSNSLAWYQQKPGQAPRLLIYDASSRATGIPDRFSGSGSGTDFTLTISRLEPEDFAIYYCQQFGTSSGLTFGGGTKLEIK

SEQ ID NO: 405 - protein, 241 aa, Artificial Sequence
  source: /note="Description of Artificial Sequence: Synthetic polypeptide"
EVQLVETGGGLVQPGGSLRLSCAASGITFSRYPMSWVRQAPGKGLEWVSGISDSGVSTYYADSAKGRFTISRDNSKNTLFLQMSSLRDEDTAVYYCVTRAGSEASDIWGQGTMVTVSSGGGGSGGGGSGGGGSEIVLTQSPATLSLSPGERATLSCRASQSVSNSLAWYQQKPGQAPRLLIYDASSRATGIPDRFSGSGSGTDFTLTISRLEPEDFAIYYCQQFGTSSGLTFGGGTKLEIK

SEQ ID NO: 406 - protein, 124 aa, Artificial Sequence
  source: /note="Description of Artificial Sequence: Synthetic polypeptide"
QVQLVESGGGLVQPGGSLRLSCAASGFTFSSYAMSWVRQAPGKGLEWVSAISGSGGSTYYADSVKGRFTISRDNAKNSLYLQMNSLRAEDTAIYYCARATYKRELRYYYGMDVWGQGTMVTVSS

SEQ ID NO: 407 - protein, 109 aa, Artificial Sequence
  source: /note="Description of Artificial Sequence: Synthetic polypeptide"
EIVMTQSPGTVSLSPGERATLSCRASQSVSSSFLAWYQQKPGQAPRLLIYGASSRATGIPDRFSGSGSGTDFTLTISRLEPEDSAVYYCQQYHSSPSWTFGQGTRLEIK

SEQ ID NO: 408 - protein, 248 aa, Artificial Sequence
  source: /note="Description of Artificial Sequence: Synthetic polypeptide"
QVQLVESGGGLVQPGGSLRLSCAASGFTFSSYAMSWVRQAPGKGLEWVSAISGSGGSTYYADSVKGRFTISRDNAKNSLYLQMNSLRAEDTAIYYCARATYKRELRYYYGMDVWGQGTMVTVSSGGGGSGGGGSGGGGSEIVMTQSPGTVSLSPGERATLSCRASQSVSSSFLAWYQQKPGQAPRLLIYGASSRATGIPDRFSGSGSGTDFTLTISRLEPEDSAVYYCQQYHSSPSWTFGQGTRLEIK

SEQ ID NO: 409 - protein, 124 aa, Artificial Sequence
  source: /note="Description of Artificial Sequence: Synthetic polypeptide"
EVQLVETGGGLVQPGGSLRLSCAASGFTFSSYAMSWVRQAPGKGLEWVSAISGSGGSTYYADSVKGRFTISRDNSKNTLYLQMNTLKAEDTAVYYCARATYKRELRYYYGMDVWGQGTTVTVSS

SEQ ID NO: 410 - protein, 109 aa, Artificial Sequence
  source: /note="Description of Artificial Sequence: Synthetic polypeptide"
EIVLTQSPSTLSLSPGESATLSCRASQSVSTTFLAWYQQKPGQAPRLLIYGSSNRATGIPDRFSGSGSGTDFTLTIRRLEPEDFAVYYCQQYHSSPSWTFGQGTKVEIK

SEQ ID NO: 411 - protein, 248 aa, Artificial Sequence
  source: /note="Description of Artificial Sequence: Synthetic polypeptide"
EVQLVETGGGLVQPGGSLRLSCAASGFTFSSYAMSWVRQAPGKGLEWVSAISGSGGSTYYADSVKGRFTISRDNSKNTLYLQMNTLKAEDTAVYYCARATYKRELRYYYGMDVWGQGTTVTVSSGGGGSGGGGSGGGGSEIVLTQSPSTLSLSPGESATLSCRASQSVSTTFLAWYQQKPGQAPRLLIYGSSNRATGIPDRFSGSGSGTDFTLTIRRLEPEDFAVYYCQQYHSSPSWTFGQGTKVEIK

SEQ ID NO: 412 - protein, 117 aa, Artificial Sequence
  source: /note="Description of Artificial Sequence: Synthetic polypeptide"
EVQLVETGGGLVQPGRSLRLSCAASGFTFDDYAMHWVRQAPGKGLEWVSGISWNSGSIGYADSVKGRFTISRDNAKNSLYLQMNSLRDEDTAVYYCARVGKAVPDVWGQGTTVTVSS

SEQ ID NO: 413 - protein, 107 aa, Artificial Sequence
  source: /note="Description of Artificial Sequence: Synthetic polypeptide"
DIVMTQTPSSLSASVGDRVTITCRASQSISSYLNWYQQKPGKAPKLLIYAASSLQSGVPSRFSGSGSGTDFTLTISSLQPEDFATYYCQQSYSTPYSFGQGTRLEIK

SEQ ID NO: 414 - protein, 239 aa, Artificial Sequence
  source: /note="Description of Artificial Sequence: Synthetic polypeptide"
EVQLVETGGGLVQPGRSLRLSCAASGFTFDDYAMHWVRQAPGKGLEWVSGISWNSGSIGYADSVKGRFTISRDNAKNSLYLQMNSLRDEDTAVYYCARVGKAVPDVWGQGTTVTVSSGGGGSGGGGSGGGGSDIVMTQTPSSLSASVGDRVTITCRASQSISSYLNWYQQKPGKAPKLLIYAASSLQSGVPSRFSGSGSGTDFTLTISSLQPEDFATYYCQQSYSTPYSFGQGTRLEIK

SEQ ID NO: 415 - protein, 122 aa, Artificial Sequence
  source: /note="Description of Artificial Sequence: Synthetic polypeptide"
EVQLVESGGGLVQPGRSLRLSCTASGFTFDDYAMHWVRQRPGKGLEWVASINWKGNSLAYGDSVKGRFAISRDNAKNTVFLQMNSLRTEDTAVYYCASHQGVAYYNYAMDVWGRGTLVTVSS

SEQ ID NO: 416 - protein, 109 aa, Artificial Sequence
  source: /note="Description of Artificial Sequence: Synthetic polypeptide"
EIVLTQSPGTLSLSPGERATLSCRATQSIGSSFLAWYQQRPGQAPRLLIYGASQRATGIPDRFSGRGSGTDFTLTISRVEPEDSAVYYCQHYESSPSWTFGQGTKVEIK

SEQ ID NO: 417 - protein, 246 aa, Artificial Sequence
  source: /note="Description of Artificial Sequence: Synthetic polypeptide"
EVQLVESGGGLVQPGRSLRLSCTASGFTFDDYAMHWVRQRPGKGLEWVASINWKGNSLAYGDSVKGRFAISRDNAKNTVFLQMNSLRTEDTAVYYCASHQGVAYYNYAMDVWGRGTLVTVSSGGGGSGGGGSGGGGSEIVLTQSPGTLSLSPGERATLSCRATQSIGSSFLAWYQQRPGQAPRLLIYGASQRATGIPDRFSGRGSGTDFTLTISRVEPEDSAVYYCQHYESSPSWTFGQGTKVEIK

SEQ ID NO: 418 - protein, 117 aa, Artificial Sequence
  source: /note="Description of Artificial Sequence: Synthetic polypeptide"
EVQLVESGGGLVQPGGSLRLSCAASGFTFSSYAMSWVRQAPGKGLEWVSAISGSGGSTYYADSVKGRFTISRDNSKNTLYLQMNSLRAEDTAVYYCAKVVRDGMDVWGQGTTVTVSS

SEQ ID NO: 419 - protein, 109 aa, Artificial Sequence
  source: /note="Description of Artificial Sequence: Synthetic polypeptide"
EIVLTQSPATLSLSPGERATLSCRASQSVSSSYLAWYQQKPGQAPRLLIYGASSRATGIPDRFSGNGSGTDFTLTISRLEPEDFAVYYCQQYGSPPRFTFGPGTKVDIK

SEQ ID NO: 420 - protein, 241 aa, Artificial Sequence
  source: /note="Description of Artificial Sequence: Synthetic polypeptide"
EVQLVESGGGLVQPGGSLRLSCAASGFTFSSYAMSWVRQAPGKGLEWVSAISGSGGSTYYADSVKGRFTISRDNSKNTLYLQMNSLRAEDTAVYYCAKVVRDGMDVWGQGTTVTVSSGGGGSGGGGSGGGGSEIVLTQSPATLSLSPGERATLSCRASQSVSSSYLAWYQQKPGQAPRLLIYGASSRATGIPDRFSGNGSGTDFTLTISRLEPEDFAVYYCQQYGSPPRFTFGPGTKVDIK

SEQ ID NO: 421 - protein, 118 aa, Artificial Sequence
  source: /note="Description of Artificial Sequence: Synthetic polypeptide"
EVQLLESGGGLVQPGGSLRLSCAASGFTFSSYAMSWVRQAPGKGLEWVSAISGSGGSTYYADSVKGRFTISRDNSKNTLYLQMNSLRAEDTAVYYCAKIPQTGTFDYWGQGTLVTVSS

SEQ ID NO: 422 - protein, 109 aa, Artificial Sequence
  source: /note="Description of Artificial Sequence: Synthetic polypeptide"
EIVLTQSPGTLSLSPGERATLSCRASQSVSSSYLAWYQQRPGQAPRLLIYGASSRATGIPDRFSGSGSGTDFTLTISRLEPEDFAVYYCQHYGSSPSWTFGQGTRLEIK

SEQ ID NO: 423 - protein, 242 aa, Artificial Sequence
  source: /note="Description of Artificial Sequence: Synthetic polypeptide"
EVQLLESGGGLVQPGGSLRLSCAASGFTFSSYAMSWVRQAPGKGLEWVSAISGSGGSTYYADSVKGRFTISRDNSKNTLYLQMNSLRAEDTAVYYCAKIPQTGTFDYWGQGTLVTVSSGGGGSGGGGSGGGGSEIVLTQSPGTLSLSPGERATLSCRASQSVSSSYLAWYQQRPGQAPRLLIYGASSRATGIPDRFSGSGSGTDFTLTISRLEPEDFAVYYCQHYGSSPSWTFGQGTRLEIK

SEQ ID NO: 424 - protein, 124 aa, Artificial Sequence
  source: /note="Description of Artificial Sequence: Synthetic polypeptide"
EVQLVETGGGLVQPGGSLRLSCAASGFTFSSYAMSWVRQAPGKGLEWVSAISGSGGSTYYADSVKGRFTMSRENDKNSVFLQMNSLRVEDTGVYYCARANYKRELRYYYGMDVWGQGTMVTVSS

SEQ ID NO: 425 - protein, 109 aa, Artificial Sequence
  source: /note="Description of Artificial Sequence: Synthetic polypeptide"
EIVMTQSPGTLSLSPGESATLSCRASQRVASNYLAWYQHKPGQAPSLLISGASSRATGVPDRFSGSGSGTDFTLAISRLEPEDSAVYYCQHYDSSPSWTFGQGTKVEIK

SEQ ID NO: 426 - protein, 248 aa, Artificial Sequence
  source: /note="Description of Artificial Sequence: Synthetic polypeptide"
EVQLVETGGGLVQPGGSLRLSCAASGFTFSSYAMSWVRQAPGKGLEWVSAISGSGGSTYYADSVKGRFTMSRENDKNSVFLQMNSLRVEDTGVYYCARANYKRELRYYYGMDVWGQGTMVTVSSGGGGSGGGGSGGGGSEIVMTQSPGTLSLSPGESATLSCRASQRVASNYLAWYQHKPGQAPSLLISGASSRATGVPDRFSGSGSGTDFTLAISRLEPEDSAVYYCQHYDSSPSWTFGQGTKVEIK

SEQ ID NO: 427 - protein, 120 aa, Artificial Sequence
  source: /note="Description of Artificial Sequence: Synthetic polypeptide"
EVQLLETGGGLVQPGGSLRLSCAASGFSFSSYAMSWVRQAPGKGLEWVSAISGSGGSTYYADSVKGRFTISRDNSKNTLYLQMNSLRAEDTAVYYCAKALVGATGAFDIWGQGTLVTVSS

SEQ ID NO: 428 - protein, 109 aa, Artificial Sequence
  source: /note="Description of Artificial Sequence: Synthetic polypeptide"
EIVLTQSPGTLSLSPGERATLSCRASQSLSSNFLAWYQQKPGQAPGLLIYGASNWATGTPDRFSGSGSGTDFTLTITRLEPEDFAVYYCQYYGTSPMYTFGQGTKVEIK

SEQ ID NO: 429 - protein, 244 aa, Artificial Sequence
  source: /note="Description of Artificial Sequence: Synthetic polypeptide"
EVQLLETGGGLVQPGGSLRLSCAASGFSFSSYAMSWVRQAPGKGLEWVSAISGSGGSTYYADSVKGRFTISRDNSKNTLYLQMNSLRAEDTAVYYCAKALVGATGAFDIWGQGTLVTVSSGGGGSGGGGSGGGGSEIVLTQSPGTLSLSPGERATLSCRASQSLSSNFLAWYQQKPGQAPGLLIYGASNWATGTPDRFSGSGSGTDFTLTITRLEPEDFAVYYCQYYGTSPMYTFGQGTKVEIK

SEQ ID NO: 430 - protein, 117 aa, Artificial Sequence
  source: /note="Description of Artificial Sequence: Synthetic polypeptide"
EVQLLESGGGLVQPGGSLRLSCAASGFTFSSYAMSWVRQAPGKGLEWVSAISGSGGSTYYADSVKGRFTISRDNSKNTLYLQMNSLRAEDTAVYYCVLWFGEGFDPWGQGTLVTVSS

SEQ ID NO: 431 - protein, 112 aa, Artificial Sequence
  source: /note="Description of Artificial Sequence: Synthetic polypeptide"
DIVLTQSPLSLPVTPGEPASISCRSSQSLLHSNGYNYLDWYLQKPGQSPQLLIYLGSNRASGVPDRFSGSGSGTDFTLKISRVEAEDVGVYYCMQALQTPLTFGGGTKVDIK

SEQ ID NO: 432 - protein, 244 aa, Artificial Sequence
  source: /note="Description of Artificial Sequence: Synthetic polypeptide"
EVQLLESGGGLVQPGGSLRLSCAASGFTFSSYAMSWVRQAPGKGLEWVSAISGSGGSTYYADSVKGRFTISRDNSKNTLYLQMNSLRAEDTAVYYCVLWFGEGFDPWGQGTLVTVSSGGGGSGGGGSGGGGSDIVLTQSPLSLPVTPGEPASISCRSSQSLLHSNGYNYLDWYLQKPGQSPQLLIYLGSNRASGVPDRFSGSGSGTDFTLKISRVEAEDVGVYYCMQALQTPLTFGGGTKVDIK

SEQ ID NO: 433 - protein, 126 aa, Artificial Sequence
  source: /note="Description of Artificial Sequence: Synthetic polypeptide"
QVQLVESGGGLVQPGGSLRLSCAASGFTFSSYAMSWVRQAPGKGLEWVSAISGSGGSTYYADSVKGRFTISRDNSKNTLYLQMNSLRAEDTAVYYCAKVGYDSSGYYRDYYGMDVWGQGTTVTVSS

SEQ ID NO: 434 - protein, 110 aa, Artificial Sequence
  source: /note="Description of Artificial Sequence: Synthetic polypeptide"
EIVLTQSPGTLSLSPGERATLSCRASQSVSSSYLAWYQQKPGQAPRLLIYGTSSRATGISDRFSGSGSGTDFTLTISRLEPEDFAVYYCQHYGNSPPKFTFGPGTKLEIK

SEQ ID NO: 435 - protein, 251 aa, Artificial Sequence
  source: /note="Description of Artificial Sequence: Synthetic polypeptide"
QVQLVESGGGLVQPGGSLRLSCAASGFTFSSYAMSWVRQAPGKGLEWVSAISGSGGSTYYADSVKGRFTISRDNSKNTLYLQMNSLRAEDTAVYYCAKVGYDSSGYYRDYYGMDVWGQGTTVTVSSGGGGSGGGGSGGGGSEIVLTQSPGTLSLSPGERATLSCRASQSVSSSYLAWYQQKPGQAPRLLIYGTSSRATGISDRFSGSGSGTDFTLTISRLEPEDFAVYYCQHYGNSPPKFTFGPGTKLEIK

SEQ ID NO: 436 - protein, 122 aa, Artificial Sequence
  source: /note="Description of Artificial Sequence: Synthetic polypeptide"
EVQLVESGGGLVQPGGSLRLSCAASGFTFSSYAMSWVRQAPGKGLEWVSAISGSGGSTYYADSVKGRFTISRDNSKNTLYLQMNSLRAEDTAVYYCAKMGWSSGYLGAFDIWGQGTTVTVSS

SEQ ID NO: 437 - protein, 109 aa, Artificial Sequence
  source: /note="Description of Artificial Sequence: Synthetic polypeptide"
EIVLTQSPGTLSLSPGERATLSCRASQSVASSFLAWYQQKPGQAPRLLIYGASGRATGIPDRFSGSGSGTDFTLTISRLEPEDFAVYYCQHYGGSPRLTFGGGTKVDIK

SEQ ID NO: 438 - protein, 246 aa, Artificial Sequence
  source: /note="Description of Artificial Sequence: Synthetic polypeptide"
EVQLVESGGGLVQPGGSLRLSCAASGFTFSSYAMSWVRQAPGKGLEWVSAISGSGGSTYYADSVKGRFTISRDNSKNTLYLQMNSLRAEDTAVYYCAKMGWSSGYLGAFDIWGQGTTVTVSSGGGGSGGGGSGGGGSEIVLTQSPGTLSLSPGERATLSCRASQSVASSFLAWYQQKPGQAPRLLIYGASGRATGIPDRFSGSGSGTDFTLTISRLEPEDFAVYYCQHYGGSPRLTFGGGTKVDIK

SEQ ID NO: 439 - protein, 122 aa, Artificial Sequence
  source: /note="Description of Artificial Sequence: Synthetic polypeptide"
QIQLVQSGPDLKKPGETVKLSCKASGYTFTNFGMNWVKQAPGKGFKWMAWINTYTGESYFADDFKGRFAFSVETSATTAYLQINNLKTEDTATYFCARGEIYYGYDGGFAYWGQGTLVTVSA

SEQ ID NO: 440 - protein, 107 aa, Artificial Sequence
  source: /note="Description of Artificial Sequence: Synthetic polypeptide"
DVVMTQSHRFMSTSVGDRVSITCRASQDVNTAVSWYQQKPGQSPKLLIFSASYRYTGVPDRFTGSGSGADFTLTISSVQAEDLAVYYCQQHYSTPWTFGGGTKLDIK

SEQ ID NO: 441 - protein, 244 aa, Artificial Sequence
  source: /note="Description of Artificial Sequence: Synthetic polypeptide"
QIQLVQSGPDLKKPGETVKLSCKASGYTFTNFGMNWVKQAPGKGFKWMAWINTYTGESYFADDFKGRFAFSVETSATTAYLQINNLKTEDTATYFCARGEIYYGYDGGFAYWGQGTLVTVSAGGGGSGGGGSGGGGSDVVMTQSHRFMSTSVGDRVSITCRASQDVNTAVSWYQQKPGQSPKLLIFSASYRYTGVPDRFTGSGSGADFTLTISSVQAEDLAVYYCQQHYSTPWTFGGGTKLDIK

SEQ ID NO: 442 - protein, 117 aa, Artificial Sequence
  source: /note="Description of Artificial Sequence: Synthetic polypeptide"
QIQLVQSGPELKKPGETVKISCKASGYTFTDYSINWVKRAPGKGLKWMGWINTETREPAYAYDFRGRFAFSLETSASTAYLQINNLKYEDTATYFCALDYSYAMDYWGQGTSVTVSS

SEQ ID NO: 443 - protein, 111 aa, Artificial Sequence
  source: /note="Description of Artificial Sequence: Synthetic polypeptide"
DIVLTQSPASLAMSLGKRATISCRASESVSVIGAHLIHWYQQKPGQPPKLLIYLASNLETGVPARFSGSGSGTDFTLTIDPVEEDDVAIYSCLQSRIFPRTFGGGTKLEIK

SEQ ID NO: 444 - protein, 249 aa, Artificial Sequence
  source: /note="Description of Artificial Sequence: Synthetic polypeptide"
QIQLVQSGPELKKPGETVKISCKASGYTFTDYSINWVKRAPGKGLKWMGWINTETREPAYAYDFRGRFAFSLETSASTAYLQINNLKYEDTATYFCALDYSYAMDYWGQGTSVTVSSGGGGSGGGGSGGGGSQIQLVQSGPELKKPGETVKISCKASGYTFTDYSINWVKRAPGKGLKWMGWINTETREPAYAYDFRGRFAFSLETSASTAYLQINNLKYEDTATYFCALDYSYAMDYWGQGTSVTVSS

SEQ ID NO: 445 - protein, 117 aa, Artificial Sequence
  source: /note="Description of Artificial Sequence: Synthetic polypeptide"
QIQLVQSGPELKKPGETVKISCKASGYTFRHYSMNWVKQAPGKGLKWMGRINTESGVPIYADDFKGRFAFSVETSASTAYLVINNLKDEDTASYFCSNDYLYSLDFWGQGTALTVSS

SEQ ID NO: 446 - protein, 111 aa, Artificial Sequence
  source: /note="Description of Artificial Sequence: Synthetic polypeptide"
DIVLTQSPPSLAMSLGKRATISCRASESVTILGSHLIYWYQQKPGQPPTLLIQLASNVQTGVPARFSGSGSRTDFTLTIDPVEEDDVAVYYCLQSRTIPRTFGGGTKLEIK

SEQ ID NO: 447 - protein, 243 aa, Artificial Sequence
  source: /note="Description of Artificial Sequence: Synthetic polypeptide"
QIQLVQSGPELKKPGETVKISCKASGYTFRHYSMNWVKQAPGKGLKWMGRINTESGVPIYADDFKGRFAFSVETSASTAYLVINNLKDEDTASYFCSNDYLYSLDFWGQGTALTVSSGGGGSGGGGSGGGGSDIVLTQSPPSLAMSLGKRATISCRASESVTILGSHLIYWYQQKPGQPPTLLIQLASNVQTGVPARFSGSGSRTDFTLTIDPVEEDDVAVYYCLQSRTIPRTFGGGTKLEIK

SEQ ID NO: 448 - protein, 117 aa, Artificial Sequence
  source: /note="Description of Artificial Sequence: Synthetic polypeptide"
QIQLVQSGPELKKPGETVKISCKASGYTFTHYSMNWVKQAPGKGLKWMGRINTETGEPLYADDFKGRFAFSLETSASTAYLVINNLKNEDTATFFCSNDYLYSCDYWGQGTTLTVSS

SEQ ID NO: 449 - protein, 243 aa, Artificial Sequence
  source: /note="Description of Artificial Sequence: Synthetic polypeptide"
QIQLVQSGPELKKPGETVKISCKASGYTFTHYSMNWVKQAPGKGLKWMGRINTETGEPLYADDFKGRFAFSLETSASTAYLVINNLKNEDTATFFCSNDYLYSCDYWGQGTTLTVSSGGGGSGGGGSGGGGSDIVLTQSPPSLAMSLGKRATISCRASESVTILGSHLIYWYQQKPGQPPTLLIQLASNVQTGVPARFSGSGSRTDFTLTIDPVEEDDVAVYYCLQSRTIPRTFGGGTKLEIK

SEQ ID NO: 450 - protein, 11 aa, Artificial Sequence
  source: /note="Description of Artificial Sequence: Synthetic peptide"
RASQSISSYLN

SEQ ID NO: 451 - protein, 12 aa, Artificial Sequence
  source: /note="Description of Artificial Sequence: Synthetic peptide"
RASQSISSSFLA

SEQ ID NO: 452 - protein, 16 aa, Artificial Sequence
  source: /note="Description of Artificial Sequence: Synthetic peptide"
RSSQSLLHSNGYNYLD

SEQ ID NO: 453 - protein, 16 aa, Artificial Sequence
  source: /note="Description of Artificial Sequence: Synthetic peptide"
KSSQSLLRNDGKTPLY

SEQ ID NO: 454 - protein, 16 aa, Artificial Sequence
  source: /note="Description of Artificial Sequence: Synthetic peptide"
RSSQSLLHSNGYNYLN

SEQ ID NO: 455 - protein, 16 aa, Artificial Sequence
  source: /note="Description of Artificial Sequence: Synthetic peptide"
RSSQSLLYSNGYNYVD

SEQ ID NO: 456 - protein, 11 aa, Artificial Sequence
  source: /note="Description of Artificial Sequence: Synthetic peptide"
RASQSVSSNLA

SEQ ID NO: 457 - protein, 11 aa, Artificial Sequence
  source: /note="Description of Artificial Sequence: Synthetic peptide"
RASQSVSSKLA

SEQ ID NO: 458 - protein, 12 aa, Artificial Sequence
  source: /note="Description of Artificial Sequence: Synthetic peptide"
RASQSVGSTNLA

SEQ ID NO: 459 - protein, 16 aa, Artificial Sequence
  source: /note="Description of Artificial Sequence: Synthetic peptide"
KSSESLVHNSGKTYLN

SEQ ID NO: 460 - protein, 11 aa, Artificial Sequence
  source: /note="Description of Artificial Sequence: Synthetic peptide"
QASEDINKFLN

SEQ ID NO: 461 - protein, 11 aa, Artificial Sequence
  source: /note="Description of Artificial Sequence: Synthetic peptide"
RASQSVGSNLA

SEQ ID NO: 462 - protein, 12 aa, Artificial Sequence
  source: /note="Description of Artificial Sequence: Synthetic peptide"
RASQSIGSSSLA

SEQ ID NO: 463 - protein, 11 aa, Artificial Sequence
  source: /note="Description of Artificial Sequence: Synthetic peptide"
KASQDIDDAMN

SEQ ID NO: 464 - protein, 11 aa, Artificial Sequence
  source: /note="Description of Artificial Sequence: Synthetic peptide"
RASQDIYNNLA

SEQ ID NO: 465 - protein, 11 aa, Artificial Sequence
  source: /note="Description of Artificial Sequence: Synthetic peptide"
GGNNIGTKSVH

SEQ ID NO: 466 - protein, 11 aa, Artificial Sequence
  source: /note="Description of Artificial Sequence: Synthetic peptide"
SGDGLSKKYVS

SEQ ID NO: 467 - protein, 11 aa, Artificial Sequence
  source: /note="Description of Artificial Sequence: Synthetic peptide"
RASQGIRNWLA

SEQ ID NO: 468 - protein, 11 aa, Artificial Sequence
  source: /note="Description of Artificial Sequence: Synthetic peptide"
GGNNIGSKSVH

SEQ ID NO: 469 - protein, 11 aa, Artificial Sequence
  source: /note="Description of Artificial Sequence: Synthetic peptide"
QGDSLGNYYAT

SEQ ID NO: 470 - protein, 12 aa, Artificial Sequence
  source: /note="Description of Artificial Sequence: Synthetic peptide"
RASQSVSSAYLA

SEQ ID NO: 471 - protein, 11 aa, Artificial Sequence
  source: /note="Description of Artificial Sequence: Synthetic peptide"
RASQSVSNSLA

SEQ ID NO: 472 - protein, 12 aa, Artificial Sequence
  source: /note="Description of Artificial Sequence: Synthetic peptide"
RASQSVSSSFLA

SEQ ID NO: 473 - protein, 12 aa, Artificial Sequence
  source: /note="Description of Artificial Sequence: Synthetic peptide"
RASQSVSTTFLA

SEQ ID NO: 474 - protein, 12 aa, Artificial Sequence
  source: /note="Description of Artificial Sequence: Synthetic peptide"
RATQSIGSSFLA

SEQ ID NO: 475 - protein, 12 aa, Artificial Sequence
  source: /note="Description of Artificial Sequence: Synthetic peptide"
RASQSVSSSYLA

SEQ ID NO: 476 - protein, 12 aa, Artificial Sequence
  source: /note="Description of Artificial Sequence: Synthetic peptide"
RASQRVASNYLA

SEQ ID NO: 477 - protein, 12 aa, Artificial Sequence
  source: /note="Description of Artificial Sequence: Synthetic peptide"
RASQSLSSNFLA

SEQ ID NO: 478 - protein, 12 aa, Artificial Sequence
  source: /note="Description of Artificial Sequence: Synthetic peptide"
RASQSVASSFLA

SEQ ID NO: 479 - protein, 11 aa, Artificial Sequence
  source: /note="Description of Artificial Sequence: Synthetic peptide"
RASQDVNTAVS

SEQ ID NO: 480 - protein, 15 aa, Artificial Sequence
  source: /note="Description of Artificial Sequence: Synthetic peptide"
RASESVSVIGAHLIH

SEQ ID NO: 481 - protein, 15 aa, Artificial Sequence
  source: /note="Description of Artificial Sequence: Synthetic peptide"
RASESVTILGSHLIY

SEQ ID NO: 482 - protein, 7 aa, Artificial Sequence
  source: /note="Description of Artificial Sequence: Synthetic peptide"
AASSLQS

SEQ ID NO: 483 - protein, 7 aa, Artificial Sequence
  source: /note="Description of Artificial Sequence: Synthetic peptide"
GASRRAT

SEQ ID NO: 484 - protein, 7 aa, Artificial Sequence
  source: /note="Description of Artificial Sequence: Synthetic peptide"
LGSNRAS

SEQ ID NO: 485 - protein, 7 aa, Artificial Sequence
  source: /note="Description of Artificial Sequence: Synthetic peptide"
EVSNRFS

SEQ ID NO: 486 - protein, 7 aa, Artificial Sequence
  source: /note="Description of Artificial Sequence: Synthetic peptide"
LGSKRAS

SEQ ID NO: 487 - protein, 7 aa, Artificial Sequence
  source: /note="Description of Artificial Sequence: Synthetic peptide"
GASTLAS

SEQ ID NO: 488 - protein, 7 aa, Artificial Sequence
  source: /note="Description of Artificial Sequence: Synthetic peptide"
GASTRAS

SEQ ID NO: 489 - protein, 7 aa, Artificial Sequence
  source: /note="Description of Artificial Sequence: Synthetic peptide"
GASIRAT

SEQ ID NO: 490 - protein, 7 aa, Artificial Sequence
  source: /note="Description of Artificial Sequence: Synthetic peptide"
EVSNRDS

SEQ ID NO: 491 - protein, 7 aa, Artificial Sequence
  source: /note="Description of Artificial Sequence: Synthetic peptide"
DASTLQT

SEQ ID NO: 492 - protein, 7 aa, Artificial Sequence
  source: /note="Description of Artificial Sequence: Synthetic peptide"
GASTRAT

SEQ ID NO: 493 - protein, 7 aa, Artificial Sequence
  source: /note="Description of Artificial Sequence: Synthetic peptide"
GASSRAS

SEQ ID NO: 494 - protein, 7 aa, Artificial Sequence
  source: /note="Description of Artificial Sequence: Synthetic peptide"
SATSPVP

SEQ ID NO: 495 - protein, 7 aa, Artificial Sequence
  source: /note="Description of Artificial Sequence: Synthetic peptide"
AANKSQS

SEQ ID NO: 496 - protein, 7 aa, Artificial Sequence
  source: /note="Description of Artificial Sequence: Synthetic peptide"
DDSVRPS

SEQ ID NO: 497 - protein, 7 aa, Artificial Sequence
  source: /note="Description of Artificial Sequence: Synthetic peptide"
RDKERPS

SEQ ID NO: 498 - protein, 7 aa, Artificial Sequence
  source: /note="Description of Artificial Sequence: Synthetic peptide"
AASNLQS

SEQ ID NO: 499 - protein, 7 aa, Artificial Sequence
  source: /note="Description of Artificial Sequence: Synthetic peptide"
GKNNRPS

SEQ ID NO: 500 - protein, 7 aa, Artificial Sequence
  source: /note="Description of Artificial Sequence: Synthetic peptide"
GTNNRPS

SEQ ID NO: 501 - protein, 7 aa, Artificial Sequence
  source: /note="Description of Artificial Sequence: Synthetic peptide"
DASSRAT

SEQ ID NO: 502 - protein, 7 aa, Artificial Sequence
  source: /note="Description of Artificial Sequence: Synthetic peptide"
GASSRAT

SEQ ID NO: 503 - protein, 7 aa, Artificial Sequence
  source: /note="Description of Artificial Sequence: Synthetic peptide"
GSSNRAT

SEQ ID NO: 504 - protein, 7 aa, Artificial Sequence
  source: /note="Description of Artificial Sequence: Synthetic peptide"
GASQRAT

SEQ ID NO: 505 - protein, 7 aa, Artificial Sequence
  source: /note="Description of Artificial Sequence: Synthetic peptide"
GASNWAT

SEQ ID NO: 506 - protein, 7 aa, Artificial Sequence
  source: /note="Description of Artificial Sequence: Synthetic peptide"
GTSSRAT

SEQ ID NO: 507 - protein, 7 aa, Artificial Sequence
  source: /note="Description of Artificial Sequence: Synthetic peptide"
GASGRAT

SEQ ID NO: 508 - protein, 7 aa, Artificial Sequence
  source: /note="Description of Artificial Sequence: Synthetic peptide"
SASYRYT

SEQ ID NO: 509 - protein, 7 aa, Artificial Sequence
  source: /note="Description of Artificial Sequence: Synthetic peptide"
LASNLET

SEQ ID NO: 510 - protein, 7 aa, Artificial Sequence
  source: /note="Description of Artificial Sequence: Synthetic peptide"
LASNVQT

SEQ ID NO: 511 - protein, 9 aa, Artificial Sequence
  source: /note="Description of Artificial Sequence: Synthetic peptide"
QQSYSTPYT

SEQ ID NO: 512 - protein, 10 aa, Artificial Sequence
  source: /note="Description of Artificial Sequence: Synthetic peptide"
QQYHSSPSWT

SEQ ID NO: 513 - protein, 9 aa, Artificial Sequence
  source: /note="Description of Artificial Sequence: Synthetic peptide"
MQALQTPYT

SEQ ID NO: 514 - protein, 8 aa, Artificial Sequence
  source: /note="Description of Artificial Sequence: Synthetic peptide"
MQNIQFPS

SEQ ID NO: 515 - protein, 8 aa, Artificial Sequence
  source: /note="Description of Artificial Sequence: Synthetic peptide"
QQSYKRAS

SEQ ID NO: 516 - protein, 9 aa, Artificial Sequence
  source: /note="Description of Artificial Sequence: Synthetic peptide"
MQGRQFPYS

SEQ ID NO: 517 - protein, 8 aa, Artificial Sequence
  source: /note="Description of Artificial Sequence: Synthetic peptide"
QQYGSSLT

SEQ ID NO: 518 - protein, 9 aa, Artificial Sequence
  source: /note="Description of Artificial Sequence: Synthetic peptide"
QQYGSSSWT

SEQ ID NO: 519 - protein, 10 aa, Artificial Sequence
  source: /note="Description of Artificial Sequence: Synthetic peptide"
QQYGSSPPWT

SEQ ID NO: 520 - protein, 7 aa, Artificial Sequence
  source: /note="Description of Artificial Sequence: Synthetic peptide"
QQSYTLA

SEQ ID NO: 521 - protein, 9 aa, Artificial Sequence
  source: /note="Description of Artificial Sequence: Synthetic peptide"
MQGTHWPGT

SEQ ID NO: 522 - protein, 9 aa, Artificial Sequence
  source: /note="Description of Artificial Sequence: Synthetic peptide"
QQYESLPLT

SEQ ID NO: 523 - protein, 10 aa, Artificial Sequence
  source: /note="Description of Artificial Sequence: Synthetic peptide"
QQYNDWLPVT

SEQ ID NO: 524 - protein, 10 aa, Artificial Sequence
  source: /note="Description of Artificial Sequence: Synthetic peptide"
QQYAGSPPFT

SEQ ID NO: 525 - protein, 9 aa, Artificial Sequence
  source: /note="Description of Artificial Sequence: Synthetic peptide"
LQHDNFPLT

SEQ ID NO: 526 - protein, 9 aa, Artificial Sequence
  source: /note="Description of Artificial Sequence: Synthetic peptide"
QHYYRFPYS

SEQ ID NO: 527 - protein, 11 aa, Artificial Sequence
  source: /note="Description of Artificial Sequence: Synthetic peptide"
QVWDSDSEHVV

SEQ ID NO: 528 - protein, 9 aa, Artificial Sequence
  source: /note="Description of Artificial Sequence: Synthetic peptide"
QAWDDTTVV

SEQ ID NO: 529 - protein, 9 aa, Artificial Sequence
  source: /note="Description of Artificial Sequence: Synthetic peptide"
QKYNSAPFT

SEQ ID NO: 530 - protein, 12 aa, Artificial Sequence
  source: /note="Description of Artificial Sequence: Synthetic peptide"
SSRDSSGDHLRV

SEQ ID NO: 531 - protein, 11 aa, Artificial Sequence
  source: /note="Description of Artificial Sequence: Synthetic peptide"
NSRDSSGHHLL

SEQ ID NO: 532 - protein, 14 aa, Artificial Sequence
  source: /note="Description of Artificial Sequence: Synthetic peptide"
QHYGSSFNGSSLFT

SEQ ID NO: 533 - protein, 10 aa, Artificial Sequence
  source: /note="Description of Artificial Sequence: Synthetic peptide"
QQFGTSSGLT

SEQ ID NO: 534 - protein, 9 aa, Artificial Sequence
  source: /note="Description of Artificial Sequence: Synthetic peptide"
QQSYSTPYS

SEQ ID NO: 535 - protein, 10 aa, Artificial Sequence
  source: /note="Description of Artificial Sequence: Synthetic peptide"
QHYESSPSWT

SEQ ID NO: 536 - protein, 10 aa, Artificial Sequence
  source: /note="Description of Artificial Sequence: Synthetic peptide"
QQYGSPPRFT

SEQ ID NO: 537 - protein, 10 aa, Artificial Sequence
  source: /note="Description of Artificial Sequence: Synthetic peptide"
QHYGSSPSWT

SEQ ID NO: 538 - protein, 10 aa, Artificial Sequence
  source: /note="Description of Artificial Sequence: Synthetic peptide"
QHYDSSPSWT

SEQ ID NO: 539 - protein, 10 aa, Artificial Sequence
  source: /note="Description of Artificial Sequence: Synthetic peptide"
QYYGTSPMYT

SEQ ID NO: 540 - protein, 9 aa, Artificial Sequence
  source: /note="Description of Artificial Sequence: Synthetic peptide"
MQALQTPLT

SEQ ID NO: 541 - protein, 11 aa, Artificial Sequence
  source: /note="Description of Artificial Sequence: Synthetic peptide"
QHYGNSPPKFT

SEQ ID NO: 542 - protein, 10 aa, Artificial Sequence
  source: /note="Description of Artificial Sequence: Synthetic peptide"
QHYGGSPRLT

SEQ ID NO: 543 - protein, 9 aa, Artificial Sequence
  source: /note="Description of Artificial Sequence: Synthetic peptide"
QQHYSTPWT

SEQ ID NO: 544 - protein, 9 aa, Artificial Sequence
  source: /note="Description of Artificial Sequence: Synthetic peptide"
LQSRIFPRT

SEQ ID NO: 545 - protein, 9 aa, Artificial Sequence
  source: /note="Description of Artificial Sequence: Synthetic peptide"
LQSRTIPRT

SEQ ID NO: 546 - protein, 7 aa, Artificial Sequence
  source: /note="Description of Artificial Sequence: Synthetic peptide"
SQSISSY

SEQ ID NO: 547 - protein, 8 aa, Artificial Sequence
  source: /note="Description of Artificial Sequence: Synthetic peptide"
SQSISSSF

SEQ ID NO: 548 - protein, 12 aa, Artificial Sequence
  source: /note="Description of Artificial Sequence: Synthetic peptide"
SQSLLHSNGYNY

SEQ ID NO: 549 - protein, 12 aa, Artificial Sequence
  source: /note="Description of Artificial Sequence: Synthetic peptide"
SQSLLRNDGKTP

SEQ ID NO: 550 - protein, 12 aa, Artificial Sequence
  source: /note="Description of Artificial Sequence: Synthetic peptide"
SQSLLYSNGYNY

SEQ ID NO: 551 - protein, 7 aa, Artificial Sequence
  source: /note="Description of Artificial Sequence: Synthetic peptide"
SQSVSSN

SEQ ID NO: 552 - protein, 7 aa, Artificial Sequence
  source: /note="Description of Artificial Sequence: Synthetic peptide"
SQSVSSK

SEQ ID NO: 553 - protein, 8 aa, Artificial Sequence
  source: /note="Description of Artificial Sequence: Synthetic peptide"
SQSVGSTN

SEQ ID NO: 554 - protein, 12 aa, Artificial Sequence
  source: /note="Description of Artificial Sequence: Synthetic peptide"
SESLVHNSGKTY

SEQ ID NO: 555 - protein, 7 aa, Artificial Sequence
  source: /note="Description of Artificial Sequence: Synthetic peptide"
SEDINKF

SEQ ID NO: 556 - protein, 7 aa, Artificial Sequence
  source: /note="Description of Artificial Sequence: Synthetic peptide"
SQSVGSN

SEQ ID NO: 557 - protein, 8 aa, Artificial Sequence
  source: /note="Description of Artificial Sequence: Synthetic peptide"
SQSIGSSS

SEQ ID NO: 558 - protein, 7 aa, Artificial Sequence
  source: /note="Description of Artificial Sequence: Synthetic peptide"
SQDIDDA

SEQ ID NO: 559 - protein, 7 aa, Artificial Sequence
  source: /note="Description of Artificial Sequence: Synthetic peptide"
SQDIYNN

SEQ ID NO: 560 - protein, 7 aa, Artificial Sequence
  source: /note="Description of Artificial Sequence: Synthetic peptide"
NNIGTKS

SEQ ID NO: 561 - protein, 7 aa, Artificial Sequence
  source: /note="Description of Artificial Sequence: Synthetic peptide"
DGLSKKY

SEQ ID NO: 562 - protein, 7 aa, Artificial Sequence
  source: /note="Description of Artificial Sequence: Synthetic peptide"
SQGIRNW

SEQ ID NO: 563 - protein, 7 aa, Artificial Sequence
  source: /note="Description of Artificial Sequence: Synthetic peptide"
NNIGSKS

SEQ ID NO: 564 - protein, 7 aa, Artificial Sequence
  source: /note="Description of Artificial Sequence: Synthetic peptide"
DSLGNYY

SEQ ID NO: 565 - protein, 8 aa, Artificial Sequence
  source: /note="Description of Artificial Sequence: Synthetic peptide"
SQSVSSAY

SEQ ID NO: 566 - protein, 7 aa, Artificial Sequence
  source: /note="Description of Artificial Sequence: Synthetic peptide"
SQSVSNS

SEQ ID NO: 567 - protein, 8 aa, Artificial Sequence
  source: /note="Description of Artificial Sequence: Synthetic peptide"
SQSVSSSF

SEQ ID NO: 568 - protein, 8 aa, Artificial Sequence
  source: /note="Description of Artificial Sequence: Synthetic peptide"
SQSVSTTF

SEQ ID NO: 569 - protein, 8 aa, Artificial Sequence
  source: /note="Description of Artificial Sequence: Synthetic peptide"
TQSIGSSF

SEQ ID NO: 570 - protein, 8 aa, Artificial Sequence
  source: /note="Description of Artificial Sequence: Synthetic peptide"
SQSVSSSY

SEQ ID NO: 571 - protein, 8 aa, Artificial Sequence
  source: /note="Description of Artificial Sequence: Synthetic peptide"
SQRVASNY

SEQ ID NO: 572 - protein, 8 aa, Artificial Sequence
  source: /note="Description of Artificial Sequence: Synthetic peptide"
SQSLSSNF

SEQ ID NO: 573 - protein, 8 aa, Artificial Sequence
  source: /note="Description of Artificial Sequence: Synthetic peptide"
SQSVASSF

SEQ ID NO: 574 - protein, 7 aa, Artificial Sequence
  source: /note="Description of Artificial Sequence: Synthetic peptide"
SQDVNTA

SEQ ID NO: 575 - protein, 11 aa, Artificial Sequence
  source: /note="Description of Artificial Sequence: Synthetic peptide"
SESVSVIGAHL

SEQ ID NO: 576 - protein, 11 aa, Artificial Sequence
  source: /note="Description of Artificial Sequence: Synthetic peptide"
SESVTILGSHL

SEQ ID NO: 577 - protein, 3 aa, Artificial Sequence
  source: /note="Description of Artificial Sequence: Synthetic peptide"
AAS

SEQ ID NO: 578 - protein, 3 aa, Artificial Sequence
  source: /note="Description of Artificial Sequence: Synthetic peptide"
GAS

SEQ ID NO: 579 - protein, 3 aa, Artificial Sequence
  source: /note="Description of Artificial Sequence: Synthetic peptide"
LGS

SEQ ID NO: 580 - protein, 3 aa, Artificial Sequence
  source: /note="Description of Artificial Sequence: Synthetic peptide"
EVS

SEQ ID NO: 581 - protein, 3 aa, Artificial Sequence
  source: /note="Description of Artificial Sequence: Synthetic peptide"
SAT

SEQ ID NO: 582 - protein, 3 aa, Artificial Sequence
  source: /note="Description of Artificial Sequence: Synthetic peptide"
AAN

SEQ ID NO: 583 - protein, 3 aa, Artificial Sequence
  source: /note="Description of Artificial Sequence: Synthetic peptide"
DDS

SEQ ID NO: 584 - protein, 3 aa, Artificial Sequence
  source: /note="Description of Artificial Sequence: Synthetic peptide"
RDK

SEQ ID NO: 585 - protein, 3 aa, Artificial Sequence
  source: /note="Description of Artificial Sequence: Synthetic peptide"
GKN

SEQ ID NO: 586 - protein, 3 aa, Artificial Sequence
  source: /note="Description of Artificial Sequence: Synthetic peptide"
GSS

SEQ ID NO: 587 - protein, 3 aa, Artificial Sequence
  source: /note="Description of Artificial Sequence: Synthetic peptide"
GTS

SEQ ID NO: 588 - protein, 3 aa, Artificial Sequence
  source: /note="Description of Artificial Sequence: Synthetic peptide"
SAS

SEQ ID NO: 589 - protein, 3 aa, Artificial Sequence
  source: /note="Description of Artificial Sequence: Synthetic peptide"
LAS

SEQ ID NO: 590 - protein, 6 aa, Artificial Sequence
  source: /note="Description of Artificial Sequence: Synthetic peptide"
SYSTPY

SEQ ID NO: 591 - protein, 7 aa, Artificial Sequence
  source: /note="Description of Artificial Sequence: Synthetic peptide"
YHSSPSW

SEQ ID NO: 592 - protein, 6 aa, Artificial Sequence
  source: /note="Description of Artificial Sequence: Synthetic peptide"
ALQTPY

SEQ ID NO: 593 - protein, 5 aa, Artificial Sequence
  source: /note="Description of Artificial Sequence: Synthetic peptide"
NIQFP

SEQ ID NO: 594 - protein, 5 aa, Artificial Sequence
  source: /note="Description of Artificial Sequence: Synthetic peptide"
SYKRA

SEQ ID NO: 595 - protein, 6 aa, Artificial Sequence
  source: /note="Description of Artificial Sequence: Synthetic peptide"
GRQFPY

SEQ ID NO: 596 - protein, 5 aa, Artificial Sequence
  source: /note="Description of Artificial Sequence: Synthetic peptide"
YGSSL

SEQ ID NO: 597 - protein, 6 aa, Artificial Sequence
  source: /note="Description of Artificial Sequence: Synthetic peptide"
YGSSSW

SEQ ID NO: 598 - protein, 7 aa, Artificial Sequence
  source: /note="Description of Artificial Sequence: Synthetic peptide"
YGSSPPW

SEQ ID NO: 599 - protein, 4 aa, Artificial Sequence
  source: /note="Description of Artificial Sequence: Synthetic peptide"
SYTL

SEQ ID NO: 600 - protein, 6 aa, Artificial Sequence
  source: /note="Description of Artificial Sequence: Synthetic peptide"
GTHWPG

SEQ ID NO: 601 - protein, 6 aa, Artificial Sequence
  source: /note="Description of Artificial Sequence: Synthetic peptide"
YESLPL

SEQ ID NO: 602 - protein, 7 aa, Artificial Sequence
  source: /note="Description of Artificial Sequence: Synthetic peptide"
YNDWLPV

SEQ ID NO: 603 - protein, 7 aa, Artificial Sequence
  source: /note="Description of Artificial Sequence: Synthetic peptide"
YAGSPPF

SEQ ID NO: 604 - protein, 6 aa, Artificial Sequence
  source: /note="Description of Artificial Sequence: Synthetic peptide"
HDNFPL

SEQ ID NO: 605 - protein, 6 aa, Artificial Sequence
  source: /note="Description of Artificial Sequence: Synthetic peptide"
YYRFPY

SEQ ID NO: 606 - protein, 8 aa, Artificial Sequence
  source: /note="Description of Artificial Sequence: Synthetic peptide"
WDSDSEHV

SEQ ID NO: 607 - protein, 6 aa, Artificial Sequence
  source: /note="Description of Artificial Sequence: Synthetic peptide"
WDDTTV

SEQ ID NO: 608 - protein, 6 aa, Artificial Sequence
  source: /note="Description of Artificial Sequence: Synthetic peptide"
YNSAPF

SEQ ID NO: 609 - protein, 9 aa, Artificial Sequence
  source: /note="Description of Artificial Sequence: Synthetic peptide"
RDSSGDHLR

SEQ ID NO: 610 - protein, 8 aa, Artificial Sequence
  source: /note="Description of Artificial Sequence: Synthetic peptide"
RDSSGHHL

SEQ ID NO: 611 - protein, 11 aa, Artificial Sequence
  source: /note="Description of Artificial Sequence: Synthetic peptide"
YGSSFNGSSLF

SEQ ID NO: 612 - protein, 7 aa, Artificial Sequence
  source: /note="Description of Artificial Sequence: Synthetic peptide"
FGTSSGL

SEQ ID NO: 613 - protein, 7 aa, Artificial Sequence
  source: /note="Description of Artificial Sequence: Synthetic peptide"
YESSPSW

SEQ ID NO: 614 - protein, 7 aa, Artificial Sequence
  source: /note="Description of Artificial Sequence: Synthetic peptide"
YGSPPRF

SEQ ID NO: 615 - protein, 7 aa, Artificial Sequence
  source: /note="Description of Artificial Sequence: Synthetic peptide"
YGSSPSW

SEQ ID NO: 616 - protein, 7 aa, Artificial Sequence
  source: /note="Description of Artificial Sequence: Synthetic peptide"
YDSSPSW

SEQ ID NO: 617 - protein, 7 aa, Artificial Sequence
  source: /note="Description of Artificial Sequence: Synthetic peptide"
YGTSPMY

SEQ ID NO: 618 - protein, 6 aa, Artificial Sequence
  source: /note="Description of Artificial Sequence: Synthetic peptide"
ALQTPL

SEQ ID NO: 619 - protein, 8 aa, Artificial Sequence
  source: /note="Description of Artificial Sequence: Synthetic peptide"
YGNSPPKF

SEQ ID NO: 620 - protein, 7 aa, Artificial Sequence
  source: /note="Description of Artificial Sequence: Synthetic peptide"
YGGSPRL

SEQ ID NO: 621 - protein, 6 aa, Artificial Sequence
  source: /note="Description of Artificial Sequence: Synthetic peptide"
HYSTPW

SEQ ID NO: 622 - protein, 6 aa, Artificial Sequence
  source: /note="Description of Artificial Sequence: Synthetic peptide"
SRIFPR

SEQ ID NO: 623 - protein, 6 aa, Artificial Sequence
  source: /note="Description of Artificial Sequence: Synthetic peptide"
SRTIPR

SEQ ID NO: 624 - protein, 5 aa, Artificial Sequence
  source: /note="Description of Artificial Sequence: Synthetic peptide"
NHGMS

SEQ ID NO: 625 - protein, 7 aa, Artificial Sequence
  source: /note="Description of Artificial Sequence: Synthetic peptide"
SSYYYWG

SEQ ID NO: 626 - protein, 7 aa, Artificial Sequence
  source: /note="Description of Artificial Sequence: Synthetic peptide"
TSGMCVS

SEQ ID NO: 627 - protein, 5 aa, Artificial Sequence
  source: /note="Description of Artificial Sequence: Synthetic peptide"
SYSMN

SEQ ID NO: 628 - protein, 5 aa, Artificial Sequence
  source: /note="Description of Artificial Sequence: Synthetic peptide"
DYYMS

SEQ ID NO: 629 - protein, 5 aa, Artificial Sequence
  source: /note="Description of Artificial Sequence: Synthetic peptide"
SHYIH

SEQ ID NO: 630 - protein, 7 aa, Artificial Sequence
  source: /note="Description of Artificial Sequence: Synthetic peptide"
SGGYYWS

SEQ ID NO: 631 - protein, 5 aa, Artificial Sequence
  source: /note="Description of Artificial Sequence: Synthetic peptide"
SYAIS

SEQ ID NO: 632 - protein, 7 aa, Artificial Sequence
  source: /note="Description of Artificial Sequence: Synthetic peptide"
SNSAAWN

SEQ ID NO: 633 - protein, 5 aa, Artificial Sequence
  source: /note="Description of Artificial Sequence: Synthetic peptide"
SYAMS

SEQ ID NO: 634 - protein, 5 aa, Artificial Sequence
  source: /note="Description of Artificial Sequence: Synthetic peptide"
RYPMS

SEQ ID NO: 635 - protein, 5 aa, Artificial Sequence
  source: /note="Description of Artificial Sequence: Synthetic peptide"
DYAMH

SEQ ID NO: 636 - protein, 5 aa, Artificial Sequence
  source: /note="Description of Artificial Sequence: Synthetic peptide"
NFGMN

SEQ ID NO: 637 - protein, 5 aa, Artificial Sequence
  source: /note="Description of Artificial Sequence: Synthetic peptide"
DYSIN

SEQ ID NO: 638 - protein, 5 aa, Artificial Sequence
  source: /note="Description of Artificial Sequence: Synthetic peptide"
HYSMN

SEQ ID NO: 639 - protein, 16 aa, Artificial Sequence
  source: /note="Description of Artificial Sequence: Synthetic peptide"
GIVYSGSTYYAASVKG

SEQ ID NO: 640 - protein, 16 aa, Artificial Sequence
  source: /note="Description of Artificial Sequence: Synthetic peptide"
SIYYSGSAYYNPSLKS

SEQ ID NO: 641 - protein, 16 aa, Artificial Sequence
  source: /note="Description of Artificial Sequence: Synthetic peptide"
RIDWDEDKFYSTSLKT

SEQ ID NO: 642 - protein, 17 aa, Artificial Sequence
  source: /note="Description of Artificial Sequence: Synthetic peptide"
SISSSSSYIYYADSVKG

SEQ ID NO: 643 - protein, 17 aa, Artificial Sequence
  source: /note="Description of Artificial Sequence: Synthetic peptide"
YISSSGSTIYYADSVKG

SEQ ID NO: 644 - protein, 17 aa, Artificial Sequence
  source: /note="Description of Artificial Sequence: Synthetic peptide"
MINPSGGVTAYSQTLQG

SEQ ID NO: 645 - protein, 16 aa, Artificial Sequence
  source: /note="Description of Artificial Sequence: Synthetic peptide"
YIYYSGSTYYNPSLKS

SEQ ID NO: 646 - protein, 17 aa, Artificial Sequence
  source: /note="Description of Artificial Sequence: Synthetic peptide"
GIIPIFGTANYAQKFQG

SEQ ID NO: 647 - protein, 18 aa, Artificial Sequence
  source: /note="Description of Artificial Sequence: Synthetic peptide"
RTYYRSKWYSFYAISLKS

SEQ ID NO: 648 - protein, 17 aa, Artificial Sequence
  source: /note="Description of Artificial Sequence: Synthetic peptide"
AISGSGGSTYYADSVKG

SEQ ID NO: 649 - protein, 17 aa, Artificial Sequence
  source: /note="Description of Artificial Sequence: Synthetic peptide"
GISDSGVSTYYADSAKG

SEQ ID NO: 650 - protein, 17 aa, Artificial Sequence
  source: /note="Description of Artificial Sequence: Synthetic peptide"
GISWNSGSIGYADSVKG

SEQ ID NO: 651 - protein, 17 aa, Artificial Sequence
  source: /note="Description of Artificial Sequence: Synthetic peptide"
SINWKGNSLAYGDSVKG

SEQ ID NO: 652 - protein, 17 aa, Artificial Sequence
  source: /note="Description of Artificial Sequence: Synthetic peptide"
WINTYTGESYFADDFKG

SEQ ID NO: 653 - protein, 17 aa, Artificial Sequence
  source: /note="Description of Artificial Sequence: Synthetic peptide"
WINTETREPAYAYDFRG

SEQ ID NO: 654 - protein, 17 aa, Artificial Sequence
  source: /note="Description of Artificial Sequence: Synthetic peptide"
RINTESGVPIYADDFKG

SEQ ID NO: 655 - protein, 17 aa, Artificial Sequence
  source: /note="Description of Artificial Sequence: Synthetic peptide"
RINTETGEPLYADDFKG

SEQ ID NO: 656 - protein, 7 aa, Artificial Sequence
  source: /note="Description of Artificial Sequence: Synthetic peptide"
HGGESDV

SEQ ID NO: 657 - protein, 11 aa, Artificial Sequence
  source: /note="Description of Artificial Sequence: Synthetic peptide"
HWQEWPDAFDI

SEQ ID NO: 658 - protein, 13 aa, Artificial Sequence
  source: /note="Description of Artificial Sequence: Synthetic peptide"
SGAGGTSATAFDI

SEQ ID NO: 659 - protein, 10 aa, Artificial Sequence
  source: /note="Description of Artificial Sequence: Synthetic peptide"
TIAAVYAFDI

SEQ ID NO: 660 - protein, 8 aa, Artificial Sequence
  source: /note="Description of Artificial Sequence: Synthetic peptide"
DLRGAFDI

SEQ ID NO: 661 - protein, 11 aa, Artificial Sequence
  source: /note="Description of Artificial Sequence: Synthetic peptide"
EGSGSGWYFDF

SEQ ID NO: 662 - protein, 13 aa, Artificial Sequence
  source: /note="Description of Artificial Sequence: Synthetic peptide"
AGIAARLRGAFDI

SEQ ID NO: 663 - protein, 20 aa, Artificial Sequence
  source: /note="Description of Artificial Sequence: Synthetic peptide"
RGGYQLLRWDVGLLRSAFDI

SEQ ID NO: 664 - protein, 13 aa, Artificial Sequence
  source: /note="Description of Artificial Sequence: Synthetic peptide"
SSPEGLFLYWFDP

SEQ ID NO: 665 - protein, 9 aa, Artificial Sequence
  source: /note="Description of Artificial Sequence: Synthetic peptide"
VEGSGSLDY

SEQ ID NO: 666 - protein, 9 aa, Artificial Sequence
  source: /note="Description of Artificial Sequence: Synthetic peptide"
RAGSEASDI

SEQ ID NO: 667 - protein, 15 aa, Artificial Sequence
  source: /note="Description of Artificial Sequence: Synthetic peptide"
ATYKRELRYYYGMDV

SEQ ID NO: 668 - protein, 8 aa, Artificial Sequence
  source: /note="Description of Artificial Sequence: Synthetic peptide"
VGKAVPDV

SEQ ID NO: 669 - protein, 13 aa, Artificial Sequence
  source: /note="Description of Artificial Sequence: Synthetic peptide"
HQGVAYYNYAMDV

SEQ ID NO: 670 - protein, 8 aa, Artificial Sequence
  source: /note="Description of Artificial Sequence: Synthetic peptide"
VVRDGMDV

SEQ ID NO: 671 - protein, 9 aa, Artificial Sequence
  source: /note="Description of Artificial Sequence: Synthetic peptide"
IPQTGTFDY

SEQ ID NO: 672 - protein, 15 aa, Artificial Sequence
  source: /note="Description of Artificial Sequence: Synthetic peptide"
ANYKRELRYYYGMDV

SEQ ID NO: 673 - protein, 11 aa, Artificial Sequence
  source: /note="Description of Artificial Sequence: Synthetic peptide"
ALVGATGAFDI

SEQ ID NO: 674 - protein, 8 aa, Artificial Sequence
  source: /note="Description of Artificial Sequence: Synthetic peptide"
WFGEGFDP

SEQ ID NO: 675 - protein, 17 aa, Artificial Sequence
  source: /note="Description of Artificial Sequence: Synthetic peptide"
VGYDSSGYYRDYYGMDV

SEQ ID NO: 676 - protein, 13 aa, Artificial Sequence
  source: /note="Description of Artificial Sequence: Synthetic peptide"
MGWSSGYLGAFDI

SEQ ID NO: 677 - protein, 13 aa, Artificial Sequence
  source: /note="Description of Artificial Sequence: Synthetic peptide"
GEIYYGYDGGFAY

SEQ ID NO: 678 - protein, 8 aa, Artificial Sequence
  source: /note="Description of Artificial Sequence: Synthetic peptide"
DYSYAMDY

SEQ ID NO: 679 - protein, 8 aa, Artificial Sequence
  source: /note="Description of Artificial Sequence: Synthetic peptide"
DYLYSLDF

SEQ ID NO: 680 - protein, 8 aa, Artificial Sequence
  source: /note="Description of Artificial Sequence: Synthetic peptide"
DYLYSCDY

SEQ ID NO: 681 - protein, 7 aa, Artificial Sequence
  source: /note="Description of Artificial Sequence: Synthetic peptide"
GFALSNH

SEQ ID NO: 682 - protein, 7 aa, Artificial Sequence
  source: /note="Description of Artificial Sequence: Synthetic peptide"
GFTFSNY

SEQ ID NO: 683 - protein, 7 aa, Artificial Sequence
  source: /note="Description of Artificial Sequence: Synthetic peptide"
GFTFDDY

SEQ ID NO: 684 - protein, 7 aa, Artificial Sequence
  source: /note="Description of Artificial Sequence: Synthetic peptide"
GYIFDNF

SEQ ID NO: 685 - protein, 7 aa, Artificial Sequence
  source: /note="Description of Artificial Sequence: Synthetic peptide"
GFTFSSD

SEQ ID NO: 686 - protein, 7 aa, Artificial Sequence
  source: /note="Description of Artificial Sequence: Synthetic peptide"
GYTFSNY

SEQ ID NO: 687 - protein, 7 aa, Artificial Sequence
  source: /note="Description of Artificial Sequence: Synthetic peptide"
GFTFSDY

SEQ ID NO: 688 - protein, 9 aa, Artificial Sequence
  source: /note="Description of Artificial Sequence: Synthetic peptide"
GGSISSSYY

SEQ ID NO: 689 - protein, 9 aa, Artificial Sequence
  source: /note="Description of Artificial Sequence: Synthetic peptide"
GFSLRTSGM

SEQ ID NO: 690 - protein, 7 aa, Artificial Sequence
  source: /note="Description of Artificial Sequence: Synthetic peptide"
GFTFSSY

SEQ ID NO: 691 - protein, 7 aa, Artificial Sequence
  source: /note="Description of Artificial Sequence: Synthetic peptide"
GYTVTSH

SEQ ID NO: 692 - protein, 9 aa, Artificial Sequence
  source: /note="Description of Artificial Sequence: Synthetic peptide"
GGSISSGGY

SEQ ID NO: 693 - protein, 7 aa, Artificial Sequence
  source: /note="Description of Artificial Sequence: Synthetic peptide"
GGTFSSY

SEQ ID NO: 694 - protein, 9 aa, Artificial Sequence
  source: /note="Description of Artificial Sequence: Synthetic peptide"
GDSVSSNSA

SEQ ID NO: 695 - protein, 7 aa, Artificial Sequence
  source: /note="Description of Artificial Sequence: Synthetic peptide"
GITFSRY

SEQ ID NO: 696 - protein, 7 aa, Artificial Sequence
  source: /note="Description of Artificial Sequence: Synthetic peptide"
GFSFSSY

SEQ ID NO: 697 - protein, 7 aa, Artificial Sequence
  source: /note="Description of Artificial Sequence: Synthetic peptide"
GYTFTNF

SEQ ID NO: 698 - protein, 7 aa, Artificial Sequence
  source: /note="Description of Artificial Sequence: Synthetic peptide"
GYTFTDY

SEQ ID NO: 699 - protein, 7 aa, Artificial Sequence
  source: /note="Description of Artificial Sequence: Synthetic peptide"
GYTFRHY

SEQ ID NO: 700 - protein, 7 aa, Artificial Sequence
  source: /note="Description of Artificial Sequence: Synthetic peptide"
GYTFTHY

SEQ ID NO: 701 - protein, 5 aa, Artificial Sequence
  source: /note="Description of Artificial Sequence: Synthetic peptide"
VYSGS

SEQ ID NO: 702 - protein, 6 aa, Artificial Sequence
  source: /note="Description of Artificial Sequence: Synthetic peptide"
SRSGEN

SEQ ID NO: 703 - protein, 6 aa, Artificial Sequence
  source: /note="Description of Artificial Sequence: Synthetic peptide"
SWNSGS

SEQ ID NO: 704 - protein, 6 aa, Artificial Sequence
  source: /note="Description of Artificial Sequence: Synthetic peptide"
NPKNNN

SEQ ID NO: 705 - protein, 6 aa, Artificial Sequence
  source: /note="Description of Artificial Sequence: Synthetic peptide"
SGSGGT

SEQ ID NO: 706 - protein, 6 aa, Artificial Sequence
  source: /note="Description of Artificial Sequence: Synthetic peptide"
SAYNGN

SEQ ID NO: 707 - protein, 6 aa, Artificial Sequence
  source: /note="Description of Artificial Sequence: Synthetic peptide"
SSSGST

SEQ ID NO: 708 - protein, 6 aa, Artificial Sequence
  source: /note="Description of Artificial Sequence: Synthetic peptide"
SSSGNT

SEQ ID NO: 709 - protein, 5 aa, Artificial Sequence
  source: /note="Description of Artificial Sequence: Synthetic peptide"
YYSGS

SEQ ID NO: 710 - protein, 5 aa, Artificial Sequence
  source: /note="Description of Artificial Sequence: Synthetic peptide"
DWDED

SEQ ID NO: 711 - protein, 6 aa, Artificial Sequence
  source: /note="Description of Artificial Sequence: Synthetic peptide"
SSSSSY

SEQ ID NO: 712 - protein, 6 aa, Artificial Sequence
  source: /note="Description of Artificial Sequence: Synthetic peptide"
NPSGGV

SEQ ID NO: 713 - protein, 6 aa, Artificial Sequence
  source: /note="Description of Artificial Sequence: Synthetic peptide"
IPIFGT

SEQ ID NO: 714 - protein, 7 aa, Artificial Sequence
  source: /note="Description of Artificial Sequence: Synthetic peptide"
YYRSKWY

SEQ ID NO: 715 - protein, 6 aa, Artificial Sequence
  source: /note="Description of Artificial Sequence: Synthetic peptide"
SGSGGS

SEQ ID NO: 716 - protein, 6 aa, Artificial Sequence
  source: /note="Description of Artificial Sequence: Synthetic peptide"
SDSGVS

SEQ ID NO: 717 - protein, 6 aa, Artificial Sequence
  source: /note="Description of Artificial Sequence: Synthetic peptide"
NWKGNS

SEQ ID NO: 718 - protein, 6 aa, Artificial Sequence
  source: /note="Description of Artificial Sequence: Synthetic peptide"
NTYTGE

SEQ ID NO: 719 - protein, 6 aa, Artificial Sequence
  source: /note="Description of Artificial Sequence: Synthetic peptide"
NTETRE

SEQ ID NO: 720 - protein, 6 aa, Artificial Sequence
  source: /note="Description of Artificial Sequence: Synthetic peptide"
NTESGV

SEQ ID NO: 721 - protein, 6 aa, Artificial Sequence
  source: /note="Description of Artificial Sequence: Synthetic peptide"
NTETGE

SEQ ID NO: 722 - protein, 11 aa, Artificial Sequence
  source: /note="Description of Artificial Sequence: Synthetic peptide"
SPAHYYGGMDV

SEQ ID NO: 723 - protein, 6 aa, Artificial Sequence
  source: /note="Description of Artificial Sequence: Synthetic peptide"
HSFLAY

SEQ ID NO: 724 - protein, 11 aa, Artificial Sequence
  source: /note="Description of Artificial Sequence: Synthetic peptide"
GPYYYQSYMDV

SEQ ID NO: 725 - protein, 14 aa, Artificial Sequence
  source: /note="Description of Artificial Sequence: Synthetic peptide"
LDSSGYYYARGPRY

SEQ ID NO: 726 - protein, 9 aa, Artificial Sequence
  source: /note="Description of Artificial Sequence: Synthetic peptide"
GPYYYYMDV

SEQ ID NO: 727 - protein, 8 aa, Artificial Sequence
  source: /note="Description of Artificial Sequence: Synthetic peptide"
ESGDGMDV

SEQ ID NO: 728 - protein, 8 aa, Artificial Sequence
  source: /note="Description of Artificial Sequence: Synthetic peptide"
STMVREDY

SEQ ID NO: 729 - protein, 10 aa, Artificial Sequence
  source: /note="Description of Artificial Sequence: Synthetic peptide"
GFALSNHGMS

SEQ ID NO: 730 - protein, 10 aa, Artificial Sequence
  source: /note="Description of Artificial Sequence: Synthetic peptide"
GFTFSNYAMS

SEQ ID NO: 731 - protein, 10 aa, Artificial Sequence
  source: /note="Description of Artificial Sequence: Synthetic peptide"
GFTFDDYAMH

SEQ ID NO: 732 - protein, 10 aa, Artificial Sequence
  source: /note="Description of Artificial Sequence: Synthetic peptide"
GYIFDNFGIN

SEQ ID NO: 733 - protein, 10 aa, Artificial Sequence
  source: /note="Description of Artificial Sequence: Synthetic peptide"
GFTFSSDAMT

SEQ ID NO: 734 - protein, 10 aa, Artificial Sequence
  source: /note="Description of Artificial Sequence: Synthetic peptide"
GYTFSNYGIT

SEQ ID NO: 735 - protein, 10 aa, Artificial Sequence
  source: /note="Description of Artificial Sequence: Synthetic peptide"
GFTFSDYYMS

SEQ ID NO: 736 - protein, 12 aa, Artificial Sequence
  source: /note="Description of Artificial Sequence: Synthetic peptide"
GGSISSSYYYWG

SEQ ID NO: 737 - protein, 12 aa, Artificial Sequence
  source: /note="Description of Artificial Sequence: Synthetic peptide"
GFSLRTSGMCVS

SEQ ID NO: 738 - protein, 10 aa, Artificial Sequence
  source: /note="Description of Artificial Sequence: Synthetic peptide"
GFTFSSYSMN

SEQ ID NO: 739 - protein, 10 aa, Artificial Sequence
  source: /note="Description of Artificial Sequence: Synthetic peptide"
GYTVTSHYIH

SEQ ID NO: 740 - protein, 12 aa, Artificial Sequence
  source: /note="Description of Artificial Sequence: Synthetic peptide"
GGSISSGGYYWS

SEQ ID NO: 741 - protein, 10 aa, Artificial Sequence
  source: /note="Description of Artificial Sequence: Synthetic peptide"
GGTFSSYAIS

SEQ ID NO: 742 - protein, 12 aa, Artificial Sequence
  source: /note="Description of Artificial Sequence: Synthetic peptide"
GDSVSSNSAAWN

SEQ ID NO: 743 - protein, 10 aa, Artificial Sequence
  source: /note="Description of Artificial Sequence: Synthetic peptide"
GFTFSSYAMS

SEQ ID NO: 744 - protein, 10 aa, Artificial Sequence
  source: /note="Description of Artificial Sequence: Synthetic peptide"
GITFSRYPMS

SEQ ID NO: 745 - protein, 10 aa, Artificial Sequence
  source: /note="Description of Artificial Sequence: Synthetic peptide"
GFSFSSYAMS

SEQ ID NO: 746 - protein, 10 aa, Artificial Sequence
  source: /note="Description of Artificial Sequence: Synthetic peptide"
GYTFTNFGMN

SEQ ID NO: 747 - protein, 10 aa, Artificial Sequence
  source: /note="Description of Artificial Sequence: Synthetic peptide"
GYTFTDYSIN

SEQ ID NO: 748 - protein, 10 aa, Artificial Sequence
  source: /note="Description of Artificial Sequence: Synthetic peptide"
GYTFRHYSMN

SEQ ID NO: 749 - protein, 10 aa, Artificial Sequence
  source: /note="Description of Artificial Sequence: Synthetic peptide"
GYTFTHYSMN

SEQ ID NO: 750 - protein, 17 aa, Artificial Sequence
  source: /note="Description of Artificial Sequence: Synthetic peptide"
GISRSGENTYYADSVKG

SEQ ID NO: 751 - protein, 17 aa, Artificial Sequence
  source: /note="Description of Artificial Sequence: Synthetic peptide"
WINPKNNNTNYAQKFQG

SEQ ID NO: 752 - protein, 17 aa, Artificial Sequence
  source: /note="Description of Artificial Sequence: Synthetic peptide"
VISGSGGTTYYADSVKG

SEQ ID NO: 753 - protein, 17 aa, Artificial Sequence
  source: /note="Description of Artificial Sequence: Synthetic peptide"
WISAYNGNTNYAQKFQG

SEQ ID NO: 754 - protein, 17 aa, Artificial Sequence
  source: /note="Description of Artificial Sequence: Synthetic peptide"
YISSSGNTIYYADSVKG

SEQ ID NO: 755-756 - skipped (2 entries)

SEQ ID NO: 757 - protein, 4 aa, Artificial Sequence
  source: /note="Description of Artificial Sequence: Synthetic peptide"
RGDS

SEQ ID NO: 758 - protein, 492 aa, Artificial Sequence
  source: /note="Description of Artificial Sequence: Synthetic polypeptide"
QVQLVQSGAEVKKPGASVKVSCKASGYTFTTYWIQWVRQAPGQRLEWMGAVYPGDADTRYTQKFQGRVTLTADRSASTAYMELSSLRSEDTAVYYCGRDAGLEYYALDYWGQGTLVTVSSASTKGPSVFPLAPSSKSTSGGTAALGCLVKDYFPEPVTVSWNSGALTSGVHTFPAVLQSSGLYSLSSVVTVPSSSLGTQTYICNVNHKPSNTKVDKRVEPKSCGGGGSGGGGSEVQLVESGGGLVQPGGSLKLSCAASGFTFNTYAMNWVRQASGKGLEWVGRIRSKYNNYATYYADSVKDRFTISRDDSKSTLYLQMNSLKTEDTAVYYCVRHGNFGNSYVSWFAYWGQGTLVTVSSGGGGSGGGGSGGGGSGGGGSQAVVTQEPSLTVSPGGTVTLTCRSSTGAVTTSNYANWVQQKPGQAPRGLIGGTNKRAPWTPARFSGSLLGDKAALTLSGAQPEDEAEYFCALWYSNLWVFGGGTKLTVLGGGGS

SEQ ID NO: 759 - protein, 215 aa, Artificial Sequence
  source: /note="Description of Artificial Sequence: Synthetic polypeptide"
EIVMTQSPATLSVSPGERATLSCRASQDVGTAVAWYQQKPGQAPRLLIYWASTRHTGIPARFSGSGSGTEFTLTISSLQSEDFAVYFCQQYANFPLYTFGQGTKLEIKRTVAAPSVFIFPPSDEQLKSGTASVVCLLNNFYPREAKVQWKVDNALQSGNSQESVTEQDSKDSTYSLSSTLTLSKADYEKHKVYACEVTHQGLSSPVTKSFNRGEC

SEQ ID NO: 760 - protein, 99 aa, Artificial Sequence
  source: /note="Description of Artificial Sequence: Synthetic polypeptide"
SQQIYGVVYGNVTFHVPSNVPLKEVLWKKQKDKVAELENSEFRAFSSFKNRVYLDTVSGSLTIYNLTSSDEDEYEMESPNITDTMKFFLYVLESGGGGS

SEQ ID NO: 761 - protein, 492 aa, Artificial Sequence
  source: /note="Description of Artificial Sequence: Synthetic polypeptide"
QVQLVQSGAEVKKPGASVKVSCKASGYTFTTYWIQWVRQAPGQRLEWMGAVYPGDADTRYTQKFQGRVTLTADRSASTAYMELSSLRSEDTAVYYCGRDAGLEYYALDYWGQGTLVTVSSASTKGPSVFPLAPSSKSTSGGTAALGCLVKDYFPEPVTVSWNSGALTSGVHTFPAVLQSSGLYSLSSVVTVPSSSLGTQTYICNVNHKPSNTKVDKRVEPKSCGGGGSGGGGSEVQLVESGGGLVQPGGSLKLSCAASGFTFNTYAMNWVRQASGKGLEWVGRIRSKYNNYATYYADSVKDRFTISRDDSKNTAYLQMNSLKTEDTAVYYCVRHGNFGNSYVSWFAHWGQGTLVTVSSGGGGSGGGGSGGGGSGGGGSQAVVTQEPSLTVSPGGTVTLTCGSSTGAVTSSNYANWVQQKPGQAPRGLIGGTNKRAPWTPARFSGSLLGGKAALTLSGAQPEDEAEYYCALWYSNLWVFGGGTKLTVLGGGGS

SEQ ID NO: 762 - protein, 492 aa, Artificial Sequence
  source: /note="Description of Artificial Sequence: Synthetic polypeptide"
QVQLVQSGAEVKKPGASVKVSCKASGYTFTTYWIQWVRQAPGQRLEWMGAVYPGDADTRYTQKFQGRVTLTADRSASTAYMELSSLRSEDTAVYYCGRDAGLEYYALDYWGQGTLVTVSSASTKGPSVFPLAPSSKSTSGGTAALGCLVKDYFPEPVTVSWNSGALTSGVHTFPAVLQSSGLYSLSSVVTVPSSSLGTQTYICNVNHKPSNTKVDKRVEPKSCGGGGSGGGGSEVQLVESGGGLVQPGGSLKLSCAASGFTFNTYAMNWVRQASGKGLEWVGRIRSKYNNYATYYADSVKDRFTISRDDSKSTAYLQMNSLKTEDTAVYYCVRHGNFGNSYVSWFAYWGQGTLVTVSSGGGGSGGGGSGGGGSGGGGSQAVVTQEPSLTVSPGGTVTLTCRSSTGAVTTSNYANWVQQKPGQAPRGLIGGTNKRAPWTPARFSGSLLGDKAALTLSGAQPEDEAEYFCALWYSNLWVFGGGTKLTVLGGGGS

SEQ ID NO: 763 - protein, 491 aa, Artificial Sequence
  source: /note="Description of Artificial Sequence: Synthetic polypeptide"
EVQLVQSGAEVKKPGESLKISCKASGYSFTNYWMNWVRQMPGKGLEWMGMIHPSDSEIRLNQKFQGQVTLSVDKSIGTAYMQWSSLKASDTAMYYCSRWYYLSSPMDYWGQGTTVTVSSASTKGPSVFPLAPSSKSTSGGTAALGCLVKDYFPEPVTVSWNSGALTSGVHTFPAVLQSSGLYSLSSVVTVPSSSLGTQTYICNVNHKPSNTKVDKRVEPKSCGGGGSGGGGSEVQLVESGGGLVQPGGSLKLSCAASGFTFNTYAMNWVRQASGKGLEWVGRIRSKYNNYATYYADSVKDRFTISRDDSKSTLYLQMNSLKTEDTAVYYCVRHGNFGNSYVSWFAYWGQGTLVTVSSGGGGSGGGGSGGGGSGGGGSQAVVTQEPSLTVSPGGTVTLTCRSSTGAVTTSNYANWVQQKPGQAPRGLIGGTNKRAPWTPARFSGSLLGDKAALTLSGAQPEDEAEYFCALWYSNLWVFGGGTKLTVLGGGGS

SEQ ID NO: 764 - protein, 214 aa, Artificial Sequence
  source: /note="Description of Artificial Sequence: Synthetic polypeptide"
EIVMTQSPATLSVSPGERATLSCRASQDVGTAVAWYQQKPGQAPRLLIYWASTRHTGIPARFSGSGSGTEFTLTISSLQSEDFAVYFCQQYSSYPYTFGQGTKLEIKRTVAAPSVFIFPPSDEQLKSGTASVVCLLNNFYPREAKVQWKVDNALQSGNSQESVTEQDSKDSTYSLSSTLTLSKADYEKHKVYACEVTHQGLSSPVTKSFNRGEC

SEQ ID NO: 765 - protein, 138 aa, Artificial Sequence
  source: /note="Description of Artificial Sequence: Synthetic polypeptide"
DVQLQASGGGSVQAGGSLRLSCAASGYTIGPYCMGWFRQAPGKEREGVAAINMGGGITYYADSVKGRFTISQDNAKNTVYLLMNSLEPEDTAIYYCAADSTIYASYYECGHGLSTGGYGYDSWGQGTQVTVSSGGGGS

SEQ ID NO: 766 - protein, 223 aa, Artificial Sequence
  source: /note="Description of Artificial Sequence: Synthetic polypeptide"
QVQLVQSGAEVKKPGASVKVSCKASGYTFTTYWIQWVRQAPGQRLEWMGAVYPGDADTRYTQKFQGRVTLTADRSASTAYMELSSLRSEDTAVYYCGRDAGLEYYALDYWGQGTLVTVSSASTKGPSVFPLAPSSKSTSGGTAALGCLVKDYFPEPVTVSWNSGALTSGVHTFPAVLQSSGLYSLSSVVTVPSSSLGTQTYICNVNHKPSNTKVDKRVEPKSC

SEQ ID NO: 767 - protein, 259 aa, Artificial Sequence
  source: /note="Description of Artificial Sequence: Synthetic polypeptide"
EVQLVESGGGLVQPGGSLKLSCAASGFTFNTYAMNWVRQASGKGLEWVGRIRSKYNNYATYYADSVKDRFTISRDDSKSTLYLQMNSLKTEDTAVYYCVRHGNFGNSYVSWFAYWGQGTLVTVSSGGGGSGGGGSGGGGSGGGGSQAVVTQEPSLTVSPGGTVTLTCRSSTGAVTTSNYANWVQQKPGQAPRGLIGGTNKRAPWTPARFSGSLLGDKAALTLSGAQPEDEAEYFCALWYSNLWVFGGGTKLTVLGGGGS

SEQ ID NO: 768 - protein, 222 aa, Artificial Sequence
  source: /note="Description of Artificial Sequence: Synthetic polypeptide"
EVQLVQSGAEVKKPGESLKISCKASGYSFTNYWMNWVRQMPGKGLEWMGMIHPSDSEIRLNQKFQGQVTLSVDKSIGTAYMQWSSLKASDTAMYYCSRWYYLSSPMDYWGQGTTVTVSSASTKGPSVFPLAPSSKSTSGGTAALGCLVKDYFPEPVTVSWNSGALTSGVHTFPAVLQSSGLYSLSSVVTVPSSSLGTQTYICNVNHKPSNTKVDKRVEPKSC

SEQ ID NO: 769 - protein, 8 aa, Artificial Sequence
  source: /note="Description of Artificial Sequence: Synthetic 8xHis tag"
HHHHHHHH

SEQ ID NO: 770 - protein, 8 aa, Artificial Sequence
  source: /note="Description of Artificial Sequence: Synthetic peptide"
EVNLYFQS

SEQ ID NO: 771 - protein, 206 aa, Artificial Sequence
  source: /note="Description of Artificial Sequence: Synthetic polypeptide"
SKEITNALETWGALGQDINLDIPSFQMSDDIDDIKWEKTSDKKKIAQFRKEKETFKEKDTYKLFKNGTLKIKHLKTDDQDIYKVSIYDTKGKNVLEKIFDLKIQERVSKPKISWTCINTTLTCEVMNGTDPELNLYQDGKHLKLSQRVITHKWTTSLSAKFKCTAGNKVSKESSVEPVSCPEKGLDGGGGSGLNDIFEAQKIEWHE

SEQ ID NO: 772 - protein, 206 aa, Artificial Sequence
  source: /note="Description of Artificial Sequence: Synthetic polypeptide"
SKEIRNALETWGALGQDIDLDIPSFQMSDDIDDIRWEKTSDKKKIAQFRKEKETFEEKDAYKLFKNGTLKIKHLKIHDQDSYKVSIYDTKGKNVLEKTFDLKIQERVSEPKISWTCINTTLTCEVMNGTDPELNLYQDGKHVKLSQRVITHKWTTSLSAKFKCTAGNKVSKESRMETVSCPEKGLDGGGGSGLNDIFEAQKIEWHE

SEQ ID NO: 773 - protein, 199 aa, Artificial Sequence
  source: /note="Description of Artificial Sequence: Synthetic polypeptide"
SQQIYGVVYGNVTFHVPSNVPLKEVLWKKQKDKVAELENSEFRAFSSFKNRVYLDTVSGSLTIYNLTSSDEDEYEMESPNITDTMKFFLYVLESLPSPTLTCALTNGSIEVQCMIPEHYNSHRGLIMYSWDCPMEQCKRNSTSIYFKMENDLPQKIQCTLSNPLFNTTSSIILTTCIPSSGHSRHRGGGGSHHHHHHHH

SEQ ID NO: 774 - protein, 107 aa, Artificial Sequence
  source: /note="Description of Artificial Sequence: Synthetic polypeptide"
SQQIYGVVYGNVTFHVPSNVPLKEVLWKKQKDKVAELENSEFRAFSSFKNRVYLDTVSGSLTIYNLTSSDEDEYEMESPNITDTMKFFLYVLESGGGGSHHHHHHHH

SEQ ID NO: 775 - protein, 107 aa, Artificial Sequence
  source: /note="Description of Artificial Sequence: Synthetic polypeptide"
SQQIYGVVYGNVTFHCPSNVPLKEVLWKKQKDKVAELENSEFRAFSSFKNRVYLDTVSGSLTIYNLTSSDEDEYECESPNITDTMKFFLYVLESGGGGSHHHHHHHH

SEQ ID NO: 776 - protein, 107 aa, Artificial Sequence
  source: /note="Description of Artificial Sequence: Synthetic polypeptide"
SQQIYGVVYGNVTFHVPSNVPLKECLWKKQKDKVAELENSEFRAFSSFKNRVYLDTVSCSLTIYNLTSSDEDEYEMESPNITDTMKFFLYVLESGGGGSHHHHHHHH

SEQ ID NO: 777 - protein, 107 aa, Artificial Sequence
  source: /note="Description of Artificial Sequence: Synthetic polypeptide"
SQQIYGVVYGNVTFHCPSNVPLKEVLWKKQKDKVAELENSEFRAFSSFKNRVYLDTVSGSLTIYNLTSSDEDEYEMESPNITDTCKFFLYVLESGGGGSHHHHHHHH

SEQ ID NO: 778 - protein, 492 aa, Artificial Sequence
  source: /note="Description of Artificial Sequence: Synthetic polypeptide"
QVQLQESGPGLVKPSETLSLTCTVSGVSLPDYGVSWIRQPPGKGLEWIGVIWGSETTYYQSSLKSRVTISKDNSKNQVSLKLSSVTAADTAVYYCAKHYYYGGSYAMDYWGQGTLVTVSSASTKGPSVFPLAPSSKSTSGGTAALGCLVKDYFPEPVTVSWNSGALTSGVHTFPAVLQSSGLYSLSSVVTVPSSSLGTQTYICNVNHKPSNTKVDKRVEPKSCGGGGSGGGGSEVQLVESGGGLVQPGGSLKLSCAASGFTFNTYAMNWVRQASGKGLEWVGRIRSKYNNYATYYADSVKDRFTISRDDSKSTLYLQMNSLKTEDTAVYYCVRHGNFGNSYVSWFAYWGQGTLVTVSSGGGGSGGGGSGGGGSGGGGSQAVVTQEPSLTVSPGGTVTLTCRSSTGAVTTSNYANWVQQKPGQAPRGLIGGTNKRAPWTPARFSGSLLGDKAALTLSGAQPEDEAEYFCALWYSNLWVFGGGTKLTVLGGGGS

SEQ ID NO: 779 - protein, 191 aa, Artificial Sequence
  source: /note="Description of Artificial Sequence: Synthetic polypeptide"
FSQQIYGVVYGNVTFHVPSNVPLKEVLWKKQKDKVAELENSEFRAFSSFKNRVYLDTVSGSLTIYNLTSSDEDEYEMESPNITDTMKFFLYVLESLPSPTLTCALTNGSIEVQCMIPEHYNSHRGLIMYSWDCPMEQCKRNSTSIYFKMENDLPQKIQCTLSNPLFNTTSSIILTTCIPSSGHSRHRGGGS

SEQ ID NO: 780 - protein, 214 aa, Artificial Sequence
  source: /note="Description of Artificial Sequence: Synthetic polypeptide"
EIVMTQSPATLSLSPGERATLSCRASQDISKYLNWYQQKPGQAPRLLIYHTSRLHSGIPARFSGSGSGTDYTLTISSLQPEDFAVYFCQQGNTLPYTFGQGTKLEIKRTVAAPSVFIFPPSDEQLKSGTASVVCLLNNFYPREAKVQWKVDNALQSGNSQESVTEQDSKDSTYSLSSTLTLSKADYEKHKVYACEVTHQGLSSPVTKSFNRGEC

SEQ ID NO: 781 - protein, 96 aa, Artificial Sequence
  source: /note="Description of Artificial Sequence: Synthetic polypeptide"
SQQIYGVVYGNVTFHCPSNVPLKEVLWKKQKDKVAELENSEFRAFSSFKNRVYLDTVSGSLTIYNLTSSDEDEYECESPNITDTMKFFLYVLESGS

SEQ ID NO: 782 - protein, 96 aa, Artificial Sequence
  source: /note="Description of Artificial Sequence: Synthetic polypeptide"
SQQIYGVVYGNVTFHVPSNVPLKECLWKKQKDKVAELENSEFRAFSSFKNRVYLDTVSCSLTIYNLTSSDEDEYEMESPNITDTMKFFLYVLESGS

SEQ ID NO: 783 - protein, 96 aa, Artificial Sequence
  source: /note="Description of Artificial Sequence: Synthetic polypeptide"
SQQIYGVVYGNVTFHCPSNVPLKEVLWKKQKDKVAELENSEFRAFSSFKNRVYLDTVSGSLTIYNLTSSDEDEYEMESPNITDTCKFFLYVLESGS

SEQ ID NO: 784-1072 - skipped (289 entries)

SEQ ID NO: 1073 - protein, 5 aa, Artificial Sequence
  source: /note="Description of Artificial Sequence: Synthetic peptide"
NYAMS

SEQ ID NO: 1074 - protein, 5 aa, Artificial Sequence
  source: /note="Description of Artificial Sequence: Synthetic peptide"
NFGIN

SEQ ID NO: 1075 - protein, 5 aa, Artificial Sequence
  source: /note="Description of Artificial Sequence: Synthetic peptide"
SDAMT

SEQ ID NO: 1076 - protein, 5 aa, Artificial Sequence
  source: /note="Description of Artificial Sequence: Synthetic peptide"
NYGIT

SEQ ID NO: 1077 - protein, 719 aa, Artificial Sequence
  source: /note="Description of Artificial Sequence: Synthetic polypeptide"
QVQLVQSGAEVKKPGASVKVSCKASGYTFTTYWIQWVRQAPGQRLEWMGAVYPGDADTRYTQKFQGRVTLTADRSASTAYMELSSLRSEDTAVYYCGRDAGLEYYALDYWGQGTLVTVSSASTKGPSVFPLAPSSKSTSGGTAALGCLVKDYFPEPVTVSWNSGALTSGVHTFPAVLQSSGLYSLSSVVTVPSSSLGTQTYICNVNHKPSNTKVDKRVEPKSCGGGGSGGGGSEVQLVESGGGLVQPGGSLKLSCAASGFTFNTYAMNWVRQASGKGLEWVGRIRSKYNNYATYYADSVKDRFTISRDDSKSTLYLQMNSLKTEDTAVYYCVRHGNFGNSYVSWFAYWGQGTLVTVSSGGGGSGGGGSGGGGSGGGGSQAVVTQEPSLTVSPGGTVTLTCRSSTGAVTTSNYANWVQQKPGQAPRGLIGGTNKRAPWTPARFSGSLLGDKAALTLSGAQPEDEAEYFCALWYSNLWVFGGGTKLTVLGGGGSDKTHTCPPCPAPELLGGPSVFLFPPKPKDTLMISRTPEVTCVVVAVSHEDPEVKFNWYVDGVEVHNAKTKPREEQYASTYRVVSVLTVLHQDWLNGKEYKCKVSNKALAAPIEKTISKAKGQPREPQVCTLPPSREEMTKNQVSLSCAVKGFYPSDIAVEWESNGQPENNYKTTPPVLDSDGSFFLVSKLTVDKSRWQQGNVFSCSVMHEALHNHYTQKSLSLSPGK

SEQ ID NO: 1078 - protein, 326 aa, Artificial Sequence
  source: /note="Description of Artificial Sequence: Synthetic polypeptide"
SQQIYGVVYGNVTFHVPSNVPLKEVLWKKQKDKVAELENSEFRAFSSFKNRVYLDTVSGSLTIYNLTSSDEDEYEMESPNITDTMKFFLYVLESGGGGSDKTHTCPPCPAPELLGGPSVFLFPPKPKDTLMISRTPEVTCVVVAVSHEDPEVKFNWYVDGVEVHNAKTKPREEQYASTYRVVSVLTVLHQDWLNGKEYKCKVSNKALAAPIEKTISKAKGQPREPQVYTLPPCREEMTKNQVSLWCLVKGFYPSDIAVEWESNGQPENNYKTTPPVLDSDGSFFLYSKLTVDKSRWQQGNVFSCSVMHEALHNRYTQKSLSLSPGK

SEQ ID NO: 1079 - protein, 719 aa, Artificial Sequence
  source: /note="Description of Artificial Sequence: Synthetic polypeptide"
QVQLVQSGAEVKKPGASVKVSCKASGYTFTTYWIQWVRQAPGQRLEWMGAVYPGDADTRYTQKFQGRVTLTADRSASTAYMELSSLRSEDTAVYYCGRDAGLEYYALDYWGQGTLVTVSSASTKGPSVFPLAPSSKSTSGGTAALGCLVKDYFPEPVTVSWNSGALTSGVHTFPAVLQSSGLYSLSSVVTVPSSSLGTQTYICNVNHKPSNTKVDKRVEPKSCGGGGSGGGGSEVQLVESGGGLVQPGGSLKLSCAASGFTFNTYAMNWVRQASGKGLEWVGRIRSKYNNYATYYADSVKDRFTISRDDSKNTAYLQMNSLKTEDTAVYYCVRHGNFGNSYVSWFAHWGQGTLVTVSSGGGGSGGGGSGGGGSGGGGSQAVVTQEPSLTVSPGGTVTLTCGSSTGAVTSSNYANWVQQKPGQAPRGLIGGTNKRAPWTPARFSGSLLGGKAALTLSGAQPEDEAEYYCALWYSNLWVFGGGTKLTVLGGGGSDKTHTCPPCPAPELLGGPSVFLFPPKPKDTLMISRTPEVTCVVVAVSHEDPEVKFNWYVDGVEVHNAKTKPREEQYASTYRVVSVLTVLHQDWLNGKEYKCKVSNKALAAPIEKTISKAKGQPREPQVCTLPPSREEMTKNQVSLSCAVKGFYPSDIAVEWESNGQPENNYKTTPPVLDSDGSFFLVSKLTVDKSRWQQGNVFSCSVMHEALHNHYTQKSLSLSPGK

SEQ ID NO: 1080 - protein, 719 aa, Artificial Sequence
  source: /note="Description of Artificial Sequence: Synthetic polypeptide"
QVQLVQSGAEVKKPGASVKVSCKASGYTFTTYWIQWVRQAPGQRLEWMGAVYPGDADTRYTQKFQGRVTLTADRSASTAYMELSSLRSEDTAVYYCGRDAGLEYYALDYWGQGTLVTVSSASTKGPSVFPLAPSSKSTSGGTAALGCLVKDYFPEPVTVSWNSGALTSGVHTFPAVLQSSGLYSLSSVVTVPSSSLGTQTYICNVNHKPSNTKVDKRVEPKSCGGGGSGGGGSEVQLVESGGGLVQPGGSLKLSCAASGFTFNTYAMNWVRQASGKGLEWVGRIRSKYNNYATYYADSVKDRFTISRDDSKSTAYLQMNSLKTEDTAVYYCVRHGNFGNSYVSWFAYWGQGTLVTVSSGGGGSGGGGSGGGGSGGGGSQAVVTQEPSLTVSPGGTVTLTCRSSTGAVTTSNYANWVQQKPGQAPRGLIGGTNKRAPWTPARFSGSLLGDKAALTLSGAQPEDEAEYFCALWYSNLWVFGGGTKLTVLGGGGSDKTHTCPPCPAPELLGGPSVFLFPPKPKDTLMISRTPEVTCVVVAVSHEDPEVKFNWYVDGVEVHNAKTKPREEQYASTYRVVSVLTVLHQDWLNGKEYKCKVSNKALAAPIEKTISKAKGQPREPQVCTLPPSREEMTKNQVSLSCAVKGFYPSDIAVEWESNGQPENNYKTTPPVLDSDGSFFLVSKLTVDKSRWQQGNVFSCSVMHEALHNHYTQKSLSLSPGK

SEQ ID NO: 1081 - protein, 718 aa, Artificial Sequence
  source: /note="Description of Artificial Sequence: Synthetic polypeptide"
EVQLVQSGAEVKKPGESLKISCKASGYSFTNYWMNWVRQMPGKGLEWMGMIHPSDSEIRLNQKFQGQVTLSVDKSIGTAYMQWSSLKASDTAMYYCSRWYYLSSPMDYWGQGTTVTVSSASTKGPSVFPLAPSSKSTSGGTAALGCLVKDYFPEPVTVSWNSGALTSGVHTFPAVLQSSGLYSLSSVVTVPSSSLGTQTYICNVNHKPSNTKVDKRVEPKSCGGGGSGGGGSEVQLVESGGGLVQPGGSLKLSCAASGFTFNTYAMNWVRQASGKGLEWVGRIRSKYNNYATYYADSVKDRFTISRDDSKSTLYLQMNSLKTEDTAVYYCVRHGNFGNSYVSWFAYWGQGTLVTVSSGGGGSGGGGSGGGGSGGGGSQAVVTQEPSLTVSPGGTVTLTCRSSTGAVTTSNYANWVQQKPGQAPRGLIGGTNKRAPWTPARFSGSLLGDKAALTLSGAQPEDEAEYFCALWYSNLWVFGGGTKLTVLGGGGSDKTHTCPPCPAPELLGGPSVFLFPPKPKDTLMISRTPEVTCVVVAVSHEDPEVKFNWYVDGVEVHNAKTKPREEQYASTYRVVSVLTVLHQDWLNGKEYKCKVSNKALAAPIEKTISKAKGQPREPQVCTLPPSREEMTKNQVSLSCAVKGFYPSDIAVEWESNGQPENNYKTTPPVLDSDGSFFLVSKLTVDKSRWQQGNVFSCSVMHEALHNHYTQKSLSLSPGK

SEQ ID NO: 1082 - protein, 365 aa, Artificial Sequence
  source: /note="Description of Artificial Sequence: Synthetic polypeptide"
DVQLQASGGGSVQAGGSLRLSCAASGYTIGPYCMGWFRQAPGKEREGVAAINMGGGITYYADSVKGRFTISQDNAKNTVYLLMNSLEPEDTAIYYCAADSTIYASYYECGHGLSTGGYGYDSWGQGTQVTVSSGGGGSDKTHTCPPCPAPELLGGPSVFLFPPKPKDTLMISRTPEVTCVVVAVSHEDPEVKFNWYVDGVEVHNAKTKPREEQYASTYRVVSVLTVLHQDWLNGKEYKCKVSNKALAAPIEKTISKAKGQPREPQVYTLPPCREEMTKNQVSLWCLVKGFYPSDIAVEWESNGQPENNYKTTPPVLDSDGSFFLYSKLTVDKSRWQQGNVFSCSVMHEALHNRYTQKSLSLSPGK

SEQ ID NO: 1083 - protein, 450 aa, Artificial Sequence
  source: /note="Description of Artificial Sequence: Synthetic polypeptide"
QVQLVQSGAEVKKPGASVKVSCKASGYTFTTYWIQWVRQAPGQRLEWMGAVYPGDADTRYTQKFQGRVTLTADRSASTAYMELSSLRSEDTAVYYCGRDAGLEYYALDYWGQGTLVTVSSASTKGPSVFPLAPSSKSTSGGTAALGCLVKDYFPEPVTVSWNSGALTSGVHTFPAVLQSSGLYSLSSVVTVPSSSLGTQTYICNVNHKPSNTKVDKRVEPKSCDKTHTCPPCPAPELLGGPSVFLFPPKPKDTLMISRTPEVTCVVVAVSHEDPEVKFNWYVDGVEVHNAKTKPREEQYASTYRVVSVLTVLHQDWLNGKEYKCKVSNKALAAPIEKTISKAKGQPREPQVCTLPPSREEMTKNQVSLSCAVKGFYPSDIAVEWESNGQPENNYKTTPPVLDSDGSFFLVSKLTVDKSRWQQGNVFSCSVMHEALHNHYTQKSLSLSPGK

SEQ ID NO: 1084 - protein, 486 aa, Artificial Sequence
  source: /note="Description of Artificial Sequence: Synthetic polypeptide"
EVQLVESGGGLVQPGGSLKLSCAASGFTFNTYAMNWVRQASGKGLEWVGRIRSKYNNYATYYADSVKDRFTISRDDSKSTLYLQMNSLKTEDTAVYYCVRHGNFGNSYVSWFAYWGQGTLVTVSSGGGGSGGGGSGGGGSGGGGSQAVVTQEPSLTVSPGGTVTLTCRSSTGAVTTSNYANWVQQKPGQAPRGLIGGTNKRAPWTPARFSGSLLGDKAALTLSGAQPEDEAEYFCALWYSNLWVFGGGTKLTVLGGGGSDKTHTCPPCPAPELLGGPSVFLFPPKPKDTLMISRTPEVTCVVVAVSHEDPEVKFNWYVDGVEVHNAKTKPREEQYASTYRVVSVLTVLHQDWLNGKEYKCKVSNKALAAPIEKTISKAKGQPREPQVYTLPPCREEMTKNQVSLWCLVKGFYPSDIAVEWESNGQPENNYKTTPPVLDSDGSFFLYSKLTVDKSRWQQGNVFSCSVMHEALHNRYTQKSLSLSPGK

SEQ ID NO: 1085 - protein, 449 aa, Artificial Sequence
  source: /note="Description of Artificial Sequence: Synthetic polypeptide"
EVQLVQSGAEVKKPGESLKISCKASGYSFTNYWMNWVRQMPGKGLEWMGMIHPSDSEIRLNQKFQGQVTLSVDKSIGTAYMQWSSLKASDTAMYYCSRWYYLSSPMDYWGQGTTVTVSSASTKGPSVFPLAPSSKSTSGGTAALGCLVKDYFPEPVTVSWNSGALTSGVHTFPAVLQSSGLYSLSSVVTVPSSSLGTQTYICNVNHKPSNTKVDKRVEPKSCDKTHTCPPCPAPELLGGPSVFLFPPKPKDTLMISRTPEVTCVVVAVSHEDPEVKFNWYVDGVEVHNAKTKPREEQYASTYRVVSVLTVLHQDWLNGKEYKCKVSNKALAAPIEKTISKAKGQPREPQVCTLPPSREEMTKNQVSLSCAVKGFYPSDIAVEWESNGQPENNYKTTPPVLDSDGSFFLVSKLTVDKSRWQQGNVFSCSVMHEALHNHYTQKSLSLSPGK

SEQ ID NO: 1086 - protein, 326 aa, Artificial Sequence
  source: /note="Description of Artificial Sequence: Synthetic polypeptide"
SQQIYGVVYGNVTFHVPSNVPLKEVLWKKQKDKVAELENSEFRAFSSFKNRVYLDTVSGSLTIYNLTSSDEDEYEMESPNITDTMKFFLYVLESGGGGSDKTHTCPPCPAPELLGGPSVFLFPPKPKDTLMISRTPEVTCVVVAVSHEDPEVKFNWYVDGVEVHNAKTKPREEQYASTYRVVSVLTVLHQDWLNGKEYKCKVSNKALAAPIEKTISKAKGQPREPQVYTLPPCREEMTKNQVSLWCLVKGFYPSDIAVEWESNGQPENNYKTTPPVLDSDGSFFLYSKLTVDKSRWQQGNVFSCSVMHEALHNHYTQKSLSLSPGK

SEQ ID NO: 1087-1088 - skipped (2 entries)

SEQ ID NO: 1089 - DNA, 2205 bp, Artificial Sequence
  source: /note="Description of Artificial Sequence: Synthetic polynucleotide"
atgccactgctgcttctactgccactcctgtgggcaggagcactggcccaagtgcaactggtgcagtccggtgccgaagtgaagaagcccggtgcctctgtgaaggtgtcctgcaaggcgtcgggatacacgttcaccacttactggattcagtgggtcagacaggccccgggacagagactggagtggatgggagccgtgtaccccggagatgcagacactcgctacacccagaagttccagggccgcgtgactttgaccgccgacagaagcgccagcaccgcctacatggagctttcatccctccggagcgaggatactgccgtatactattgcggaagggatgccggcctggaatactatgccctcgactactggggacaggggaccctcgtgactgtgtccagcgcgagcaccaagggccccagcgtgttcccgctggccccatcatccaagtccacctcgggagggactgctgcgctcggttgccttgtgaaggactacttccccgagcccgtgactgtgtcgtggaacagcggggctctgaccagcggggttcacacctttcccgccgtgctgcagtcctcgggactctacagcctgtcctccgtggtcacggtcccgtcgtcgtcgctggggacccagacctacatttgcaacgtgaaccacaaaccctccaacacaaaagtggacaaaagggtggaacctaagtcctgtggagggggtggatcaggcggaggaggatcggaagtccagctcgtcgaatcagggggagggcttgtgcaaccaggaggctccctcaagctgtcttgcgcagcgtccggtttcactttcaacacttatgcgatgaattgggtccgccaagccagtgggaagggcctggagtgggtcggacggatcagatccaagtacaacaactacgcgacatactacgccgactccgtgaaggatcgcttcaccatcagccgggatgactccaagagcaccttgtacctccaaatgaacagccttaagaccgaggacactgcggtgtactactgcgtgagacacggcaacttcggaaactcctacgtgtcctggttcgcctactggggacagggcacccttgtcactgtgtcaagcggaggcggtggttcgggtggcggaggttccggaggaggaggttcgggcggtggtggatcacaggccgtcgtgactcaggaaccatccctgactgtgtcccccggtggaaccgtgaccctcacctgtcgctcctcaaccggagccgtgaccacctccaactacgctaattgggtgcagcagaagccaggacaagccccacggggactgattgggggcaccaacaagagggctccttggaccccagcccgcttctcgggctccctgttgggcgacaaggccgctctgaccctgtccggtgcacagccggaggatgaagccgaatacttctgcgcgctgtggtactccaacctctgggtgttcggcggagggaccaagctgactgtgttgggaggaggggggagtgacaagactcacacgtgtccgccttgcccagcacccgagctactgggaggaccgagcgtgttcctgtttcccccgaagccgaaggataccctgatgatctcccgcactcctgaagtgacttgcgtggtggtggcagtgtcccacgaggacccggaagtcaagtttaattggtacgtggatggcgtggaggtgcacaacgcaaagaccaagcctcgcgaggagcagtacgccagcacctaccgggtggtgtccgtcctgacggtgctgcaccaggactggctgaacgggaaggagtacaagtgcaaagtgtcaaataaggctttggccgcccctattgagaaaaccatctcaaaggccaagggccaacccagggaacctcaagtgtgcaccctcccaccttcgcgagaagagatgaccaagaaccaggtgtccctgtcctgcgccgtgaagggcttctacccctccgatatcgccgtggagtgggaatctaacggacagccggagaacaactacaagaccactccgccggtgctggacagcgacggctccttcttcctcgtgtcgaaactgaccgtggacaagtcacggtggcagcagggcaatgtgttcagctgctcagtcatgcatgaggccctccacaaccactacactcagaagtccctgtcgctttcccccggaaaa

SEQ ID NO: 1090 - DNA, 705 bp, Artificial Sequence
  source: /note="Description of Artificial Sequence: Synthetic polynucleotide"
atgtcggtcctgacccaagtgctggccctccttctcctgtggctgaccgggaccagatgcgaaatcgtcatgactcagagcccggcaaccctgtccgtgagccctggagaacgggccactctgagctgtcgggcgtcacaggacgtgggaactgccgtggcctggtatcagcagaagccgggacaggctcctaggttgctcatctactgggcgtccactcgccacaccggaatcccagcccgcttctccggctcgggttctggcaccgagttcaccctgaccatttcctccctccaatccgaggatttcgccgtgtacttctgccaacaatacgccaacttccccctgtacacatttggccaggggaccaagctggagattaagcgtacggtggccgctcccagcgtgttcatcttcccccccagcgacgagcagctgaagagcggcaccgccagcgtggtgtgcctgctgaacaacttctacccccgggaggccaaggtgcagtggaaggtggacaacgccctgcagagcggcaacagccaggagagcgtcaccgagcaggacagcaaggactccacctacagcctgagcagcaccctgaccctgagcaaggccgactacgagaagcataaggtgtacgcctgcgaggtgacccaccagggcctgtccagccccgtgaccaagagcttcaacaggggcgagtgc

SEQ ID NO: 1091 - DNA, 1026 bp, Artificial Sequence
  source: /note="Description of Artificial Sequence: Synthetic polynucleotide"
atgcctctgctgctcctgctgcctctgctctgggccggagctttggcatcacagcaaatctacggcgtggtgtacggcaacgtgaccttccatgtcccctccaatgtgccgctgaaggaagtgctctggaagaagcagaaggacaaggtcgcggaactggaaaactccgagtttcgcgccttctcctccttcaaaaaccgggtgtacctggacaccgtgtccgggagccttactatctacaacctgacctcctcggacgaggatgagtatgagatggagagcccaaacattaccgacaccatgaagttcttcctctacgtgctggaatcgggtggaggcggaagcgataagactcacacgtgtccaccttgtcccgcacccgaactcctggggggaccttccgtgtttctcttcccccctaaaccgaaggacaccttgatgatctcccgcactcctgaagtgacctgtgtggtggtggccgtgtcccacgaggacccagaagtcaagtttaattggtacgtggacggagtcgaggtgcacaacgcgaaaaccaaaccgcgggaggagcagtacgcctccacctaccgggtggtgtccgtcctcactgtgctgcaccaggactggctcaacggaaaggagtacaagtgcaaagtgtccaacaaagccttggcggccccaatcgaaaagacgatctccaaggccaagggacagccgcgcgaacctcaagtctacaccctgcctccttgccgcgaggaaatgaccaagaaccaggtgtcactgtggtgtctggtcaagggattctacccttccgatatcgcagtggagtgggaaagcaacggccaaccagagaacaactataagaccacacccccggtgctcgattccgacggctcattcttcctgtactccaagctgaccgtggacaagtcacggtggcagcaggggaacgtgttcagctgctccgtgatgcatgaagccctgcacaatcattacactcagaagtccctgtcgctgagccccggaaaa

SEQ ID NO: 1092 - DNA, 2205 bp, Artificial Sequence
  source: /note="Description of Artificial Sequence: Synthetic polynucleotide"
atgccactgctgcttctactgccactcctgtgggcaggagcactggcccaagtgcaactggtgcagtccggtgccgaagtgaagaagcccggtgcctctgtgaaggtgtcctgcaaggcgtcgggatacacgttcaccacttactggattcagtgggtcagacaggccccgggacagagactggagtggatgggagccgtgtaccccggagatgcagacactcgctacacccagaagttccagggccgcgtgactttgaccgccgacagaagcgccagcaccgcctacatggagctttcatccctccggagcgaggatactgccgtatactattgcggaagggatgccggcctggaatactatgccctcgactactggggacaggggaccctcgtgactgtgtccagcgcgagcaccaagggcccgagcgtgttcccattggccccgtcgtcaaagtccacctctggcggaactgcggctctgggatgtctcgtgaaggactactttccggaacccgtgactgtgtcctggaacagcggcgccctcacttccggcgtgcataccttccctgccgtgctgcagtcctccggcctgtacagcctcagcagcgtcgtgactgtgccctcctcgtccttgggcacccagacctacatctgcaacgtcaaccacaagccctcgaacaccaaagtggataagcgggtggaacccaagagctgtggagggggtggctcaggaggagggggatccgaagtgcagctcgtggagtccggaggaggcctggtgcagcctgggggatccctcaagcttagctgcgccgcatcaggcttcaccttcaacacctacgccatgaactgggtccgccaagcatccggaaagggcctggaatgggtcgggagaatcagatccaagtacaacaactacgccacgtactacgcggactccgtcaaggaccggttcactattagccgggatgactccaagaataccgcgtaccttcagatgaactcgctcaaaaccgaggacactgccgtgtattactgcgtgcggcacggaaacttcgggaacagttacgtgtcctggttcgcccattggggtcaaggcaccctggtcaccgtgtcctcgggtggtggtggctccggtggaggaggatcggggggtggaggatctgggggaggcggatcacaggcggtcgtgactcaggagccctccctgaccgtgtcgcctggtggcaccgtgactctgacttgcggaagctcaacaggcgccgtgacctcctcgaactacgccaactgggtgcaacagaagccgggacaagcccctaggggactgatcggggggaccaacaagcgcgctccgtggactcccgcgaggttctccggaagcctcctgggagggaaggcagccctgaccctgtccggagctcagccagaagatgaggccgagtactattgcgccctgtggtactcgaatctgtgggtgtttggaggcggcaccaagctgaccgtcctgggtggtggcggaagcgacaagactcacacgtgtccgccttgcccagcacccgagctactgggaggaccgagcgtgttcctgtttcccccgaagccgaaggataccctgatgatctcccgcactcctgaagtgacttgcgtggtggtggcagtgtcccacgaggacccggaagtcaagtttaattggtacgtggatggcgtggaggtgcacaacgcaaagaccaagcctcgcgaggagcagtacgccagcacctaccgggtggtgtccgtcctgacggtgctgcaccaggactggctgaacgggaaggagtacaagtgcaaagtgtcaaataaggctttggccgcccctattgagaaaaccatctcaaaggccaagggccaacccagggaacctcaagtgtgcaccctcccaccttcgcgagaagagatgaccaagaaccaggtgtccctgtcctgcgccgtgaagggcttctacccctccgatatcgccgtggagtgggaatctaacggacagccggagaacaactacaagaccactccgccggtgctggacagcgacggctccttcttcctcgtgtcgaaactgaccgtggacaagtcacggtggcagcagggcaatgtgttcagctgctcagtcatgcatgaggccctccacaaccactacactcagaagtccctgtcgctttcccccggaaaa

SEQ ID NO: 1093 - DNA, 645 bp, Artificial Sequence
  source: /note="Description of Artificial Sequence: Synthetic polynucleotide"
gaaatcgtcatgactcagagcccggcaaccctgtccgtgagccctggagaacgggccactctgagctgtcgggcgtcacaggacgtgggaactgccgtggcctggtatcagcagaagccgggacaggctcctaggttgctcatctactgggcgtccactcgccacaccggaatcccagcccgcttctccggctcgggttctggcaccgagttcaccctgaccatttcctccctccaatccgaggatttcgccgtgtacttctgccaacaatacgccaacttccccctgtacacatttggccaggggaccaagctggagattaagcgtacggtggccgctcccagcgtgttcatcttcccccccagcgacgagcagctgaagagcggcaccgccagcgtggtgtgcctgctgaacaacttctacccccgggaggccaaggtgcagtggaaggtggacaacgccctgcagagcggcaacagccaggagagcgtcaccgagcaggacagcaaggactccacctacagcctgagcagcaccctgaccctgagcaaggccgactacgagaagcataaggtgtacgcctgcgaggtgacccaccagggcctgtccagccccgtgaccaagagcttcaacaggggcgagtgc

SEQ ID NO: 1094 - protein, 719 aa, Artificial Sequence
  source: /note="Description of Artificial Sequence: Synthetic polypeptide"
QVQLQESGPGLVKPSETLSLTCTVSGVSLPDYGVSWIRQPPGKGLEWIGVIWGSETTYYQSSLKSRVTISKDNSKNQVSLKLSSVTAADTAVYYCAKHYYYGGSYAMDYWGQGTLVTVSSASTKGPSVFPLAPSSKSTSGGTAALGCLVKDYFPEPVTVSWNSGALTSGVHTFPAVLQSSGLYSLSSVVTVPSSSLGTQTYICNVNHKPSNTKVDKRVEPKSCGGGGSGGGGSEVQLVESGGGLVQPGGSLKLSCAASGFTFNTYAMNWVRQASGKGLEWVGRIRSKYNNYATYYADSVKDRFTISRDDSKSTLYLQMNSLKTEDTAVYYCVRHGNFGNSYVSWFAYWGQGTLVTVSSGGGGSGGGGSGGGGSGGGGSQAVVTQEPSLTVSPGGTVTLTCRSSTGAVTTSNYANWVQQKPGQAPRGLIGGTNKRAPWTPARFSGSLLGDKAALTLSGAQPEDEAEYFCALWYSNLWVFGGGTKLTVLGGGGSDKTHTCPPCPAPELLGGPSVFLFPPKPKDTLMISRTPEVTCVVVAVSHEDPEVKFNWYVDGVEVHNAKTKPREEQYGSTYRVVSVLTVLHQDWLNGKEYKCKVSNKALAAPIEKTISKAKGQPREPQVCTLPPSRDELTKNQVSLSCAVKGFYPSDIAVEWESNGQPENNYKTTPPVLDSDGSFFLVSKLTVDKSRWQQGNVFSCSVMHEALHNHYTQKSLSLSPGK

SEQ ID NO: 1095 - protein, 418 aa, Artificial Sequence
  source: /note="Description of Artificial Sequence: Synthetic polypeptide"
FSQQIYGVVYGNVTFHVPSNVPLKEVLWKKQKDKVAELENSEFRAFSSFKNRVYLDTVSGSLTIYNLTSSDEDEYEMESPNITDTMKFFLYVLESLPSPTLTCALTNGSIEVQCMIPEHYNSHRGLIMYSWDCPMEQCKRNSTSIYFKMENDLPQKIQCTLSNPLFNTTSSIILTTCIPSSGHSRHRGGGSDKTHTCPPCPAPELLGGPSVFLFPPKPKDTLMISRTPEVTCVVVDVSHEDPEVKFNWYVDGVEVHNAKTKPREEQYASTYRVVSVLTVLHQDWLNGKEYKCKVSNKALPAPIEKTISKAKGQPREPQVYTLPPCREEMTKNQVSLWCLVKGFYPSDIAVEWESNGQPENNYKTTPPVLDSDGSFFLYSKLTVDKSRWQQGNVFSCSVMHEALHNRYTQKSLSLSPGK

SEQ ID NO: 1096 - protein, 323 aa, Artificial Sequence
  source: /note="Description of Artificial Sequence: Synthetic polypeptide"
SQQIYGVVYGNVTFHCPSNVPLKEVLWKKQKDKVAELENSEFRAFSSFKNRVYLDTVSGSLTIYNLTSSDEDEYECESPNITDTMKFFLYVLESGSDKTHTCPPCPAPELLGGPSVFLFPPKPKDTLMISRTPEVTCVVVDVSHEDPEVKFNWYVDGVEVHNAKTKPREEQYASTYRVVSVLTVLHQDWLNGKEYKCKVSNKALPAPIEKTISKAKGQPREPQVYTLPPCREEMTKNQVSLWCLVKGFYPSDIAVEWESNGQPENNYKTTPPVLDSDGSFFLYSKLTVDKSRWQQGNVFSCSVMHEALHNRYTQKSLSLSPGK

SEQ ID NO: 1097 - protein, 323 aa, Artificial Sequence
  source: /note="Description of Artificial Sequence: Synthetic polypeptide"
SQQIYGVVYGNVTFHVPSNVPLKECLWKKQKDKVAELENSEFRAFSSFKNRVYLDTVSCSLTIYNLTSSDEDEYEMESPNITDTMKFFLYVLESGSDKTHTCPPCPAPELLGGPSVFLFPPKPKDTLMISRTPEVTCVVVDVSHEDPEVKFNWYVDGVEVHNAKTKPREEQYASTYRVVSVLTVLHQDWLNGKEYKCKVSNKALPAPIEKTISKAKGQPREPQVYTLPPCREEMTKNQVSLWCLVKGFYPSDIAVEWESNGQPENNYKTTPPVLDSDGSFFLYSKLTVDKSRWQQGNVFSCSVMHEALHNRYTQKSLSLSPGK

SEQ ID NO: 1098 - protein, 323 aa, Artificial Sequence
  source: /note="Description of Artificial Sequence: Synthetic polypeptide"
SQQIYGVVYGNVTFHCPSNVPLKEVLWKKQKDKVAELENSEFRAFSSFKNRVYLDTVSGSLTIYNLTSSDEDEYEMESPNITDTCKFFLYVLESGSDKTHTCPPCPAPELLGGPSVFLFPPKPKDTLMISRTPEVTCVVVDVSHEDPEVKFNWYVDGVEVHNAKTKPREEQYASTYRVVSVLTVLHQDWLNGKEYKCKVSNKALPAPIEKTISKAKGQPREPQVYTLPPCREEMTKNQVSLWCLVKGFYPSDIAVEWESNGQPENNYKTTPPVLDSDGSFFLYSKLTVDKSRWQQGNVFSCSVMHEALHNRYTQKSLSLSPGK

SEQ ID NO: 1099 - protein, 227 aa, Artificial Sequence
  source: /note="Description of Artificial Sequence: Synthetic polypeptide"
DKTHTCPPCPAPELLGGPSVFLFPPKPKDTLMISRTPEVTCVVVAVSHEDPEVKFNWYVDGVEVHNAKTKPREEQYASTYRVVSVLTVLHQDWLNGKEYKCKVSNKALAAPIEKTISKAKGQPREPQVYTLPPCREEMTKNQVSLWCLVKGFYPSDIAVEWESNGQPENNYKTTPPVLDSDGSFFLYSKLTVDKSRWQQGNVFSCSVMHEALHNHYTQKSLSLSPGK

SEQ ID NO: 1100 - protein, 727 aa, Artificial Sequence
  source: /note="Description of Artificial Sequence: Synthetic polypeptide"
QVQLQQSGPGLVKPSQTLSLTCAISGDSVSSNSAAWSWIRQSPGRGLEWLGRIYYRSKWYNDYAVSVKSRITINPDTSKNQFSLQLNSVTPEDTAVYYCARLDHRYHEDTVYPGMDVWGQGTLVTVSSASTKGPSVFPLAPSSKSTSGGTAALGCLVKDYFPEPVTVSWNSGALTSGVHTFPAVLQSSGLYSLSSVVTVPSSSLGTQTYICNVNHKPSNTKVDKRVEPKSCGGGGSGGGGSEVQLVESGGGLVQPGGSLKLSCAASGFTFNTYAMNWVRQASGKGLEWVGRIRSKYNNYATYYADSVKDRFTISRDDSKSTLYLQMNSLKTEDTAVYYCVRHGNFGNSYVSWFAYWGQGTLVTVSSGGGGSGGGGSGGGGSGGGGSQAVVTQEPSLTVSPGGTVTLTCRSSTGAVTTSNYANWVQQKPGQAPRGLIGGTNKRAPWTPARFSGSLLGDKAALTLSGAQPEDEAEYFCALWYSNLWVFGGGTKLTVLGGGGSDKTHTCPPCPAPELLGGPSVFLFPPKPKDTLMISRTPEVTCVVVAVSHEDPEVKFNWYVDGVEVHNAKTKPREEQYASTYRVVSVLTVLHQDWLNGKEYKCKVSNKALAAPIEKTISKAKGQPREPQVCTLPPSREEMTKNQVSLSCAVKGFYPSDIAVEWESNGQPENNYKTTPPVLDSDGSFFLVSKLTVDKSRWQQGNVFSCSVMHEALHNHYTQKSLSLSPGK

SEQ ID NO: 1101 - protein, 213 aa, Artificial Sequence
  source: /note="Description of Artificial Sequence: Synthetic polypeptide"
DIELTQPPSVSVAPGQTARISCSGDNLPAYTVTWYQQKPGQAPVLVIYDDSDRPSGIPERFSGSNSGNTATLTISGTQAEDEADYYCASWDPSSGVVFGGGTKLTVLGQPKAAPSVTLFPPSSEELQANKATLVCLISDFYPGAVTVAWKADSSPVKAGVETTTPSKQSNNKYAASSYLSLTPEQWKSHRSYSCQVTHEGSTVEKTVAPTECS

SEQ ID NO: 1102 - protein, 227 aa, Artificial Sequence
  source: /note="Description of Artificial Sequence: Synthetic polypeptide"
DKTHTCPPCPAPELLGGPSVFLFPPKPKDTLMISRTPEVTCVVVAVSHEDPEVKFNWYVDGVEVHNAKTKPREEQYASTYRVVSVLTVLHQDWLNGKEYKCKVSNKALAAPIEKTISKAKGQPREPQVYTLPPCREEMTKNQVSLWCLVKGFYPSDIAVEWESNGQPENNYKTTPPVLDSDGSFFLYSKLTVDKSRWQQGNVFSCSVMHEALHNRYTQKSLSLSPGK

SEQ ID NO: 1103 - DNA, 729 bp, Artificial Sequence
  source: /note="Description of Artificial Sequence: Synthetic polynucleotide"
atgcctctgctgctcctgctgcctctgctctgggccggagctttggcagataagactcacacgtgtccaccttgtcccgcacccgaactcctggggggaccttccgtgtttctcttcccccctaaaccgaaggacaccttgatgatctcccgcactcctgaagtgacctgtgtggtggtggccgtgtcccacgaggacccagaagtcaagtttaattggtacgtggacggagtcgaggtgcacaacgcgaaaaccaaaccgcgggaggagcagtacgcctccacctaccgggtggtgtccgtcctcactgtgctgcaccaggactggctcaacggaaaggagtacaagtgcaaagtgtccaacaaagccttggcggccccaatcgaaaagacgatctccaaggccaagggacagccgcgcgaacctcaagtctacaccctgcctccttgccgcgaggaaatgaccaagaaccaggtgtcactgtggtgtctggtcaagggattctacccttccgatatcgcagtggagtgggaaagcaacggccaaccagagaacaactataagaccacacccccggtgctcgattccgacggctcattcttcctgtactccaagctgaccgtggacaagtcacggtggcagcaggggaacgtgttcagctgctccgtgatgcatgaagccctgcacaatcattacactcagaagtccctgtcgctgagccccggaaaa

SEQ ID NO: 1104 - DNA, 2229 bp, Artificial Sequence
  source: /note="Description of Artificial Sequence: Synthetic polynucleotide"
atgcctctgctgctcctgttgcccctgctgtgggctggagccttggcccaagtgcagcttcagcagtcgggacccggactcgtgaagccgtcgcagacgctgtccctgacctgtgccattagcggcgactccgtgagcagcaacagcgcagcctggtcctggattcggcagtcacctggtcgggggcttgaatggctgggacggatctactaccgctcgaaatggtataacgactacgccgtgtctgtgaagtccaggatcaccatcaacccggacacctccaagaatcagttctccctccaactgaactcagtgaccccagaggacaccgccgtctactactgcgcgagactggatcaccgctaccatgaagataccgtgtacccggggatggacgtctggggccagggtactctcgtcactgtgtcctccgcgtccactaagggccccagcgtgttcccgctggccccatcatccaagtccacctcgggagggactgctgcgctcggttgccttgtgaaggactacttccccgagcccgtgactgtgtcgtggaacagcggggctctgaccagcggggttcacacctttcccgccgtgctgcagtcctcgggactctacagcctgtcctccgtggtcacggtcccgtcgtcgtcgctggggacccagacctacatttgcaacgtgaaccacaaaccctccaacacaaaagtggacaaaagggtggaacctaagtcctgtggagggggtggatcaggcggaggaggatcggaagtccagctcgtcgaatcagggggagggcttgtgcaaccaggaggctccctcaagctgtcttgcgcagcgtccggtttcactttcaacacttatgcgatgaattgggtccgccaagccagtgggaagggcctggagtgggtcggacggatcagatccaagtacaacaactacgcgacatactacgccgactccgtgaaggatcgcttcaccatcagccgggatgactccaagagcaccttgtacctccaaatgaacagccttaagaccgaggacactgcggtgtactactgcgtgagacacggcaacttcggaaactcctacgtgtcctggttcgcctactggggacagggcacccttgtcactgtgtcaagcggaggcggtggttcgggtggcggaggttccggaggaggaggttcgggcggtggtggatcacaggccgtcgtgactcaggaaccatccctgactgtgtcccccggtggaaccgtgaccctcacctgtcgctcctcaaccggagccgtgaccacctccaactacgctaattgggtgcagcagaagccaggacaagccccacggggactgattgggggcaccaacaagagggctccttggaccccagcccgcttctcgggctccctgttgggcgacaaggccgctctgaccctgtccggtgcacagccggaggatgaagccgaatacttctgcgcgctgtggtactccaacctctgggtgttcggcggagggaccaagctgactgtgttgggaggaggggggagtgacaagactcacacgtgtccgccttgcccagcacccgagctactgggaggaccgagcgtgttcctgtttcccccgaagccgaaggataccctgatgatctcccgcactcctgaagtgacttgcgtggtggtggcagtgtcccacgaggacccggaagtcaagtttaattggtacgtggatggcgtggaggtgcacaacgcaaagaccaagcctcgcgaggagcagtacgccagcacctaccgggtggtgtccgtcctgacggtgctgcaccaggactggctgaacgggaaggagtacaagtgcaaagtgtcaaataaggctttggccgcccctattgagaaaaccatctcaaaggccaagggccaacccagggaacctcaagtgtgcaccctcccaccttcgcgagaagagatgaccaagaaccaggtgtccctgtcctgcgccgtgaagggcttctacccctccgatatcgccgtggagtgggaatctaacggacagccggagaacaactacaagaccactccgccggtgctggacagcgacggctccttcttcctcgtgtcgaaactgaccgtggacaagtcacggtggcagcagggcaatgtgttcagctgctcagtcatgcatgaggccctccacaaccactacactcagaagtccctgtcgctttcccccggaaaa

SEQ ID NO: 1105 - DNA, 699 bp, Artificial Sequence
  source: /note="Description of Artificial Sequence: Synthetic polynucleotide"
atgtccgtgctgacccaagtcttggcgctgctgctgctgtggctcactggcacccgctgtgacattgaactgacccagccgccttcagtgtccgtggcacccggacagaccgcgaggattagctgctccggggacaacctcccggcctacactgtgacctggtatcagcagaagcccggacaagcccctgtgcttgtcatctacgacgactcggatcggccaagcggcatccccgagagattctccggctcgaacagcgggaacaccgccacgctcactatctcgggaacccaggccgaagatgaggctgactactactgcgcctcatgggatccgtcctccggagtggtgttcggtggcggaactaagctgaccgtgctgggtcagcctaaggcggcgccctcagtgaccctgttccctccgtcgtctgaagaactccaggccaacaaggccaccctcgtgtgcctgatttcggacttctacccgggagccgtcactgtggcctggaaggccgacagcagcccagtgaaggccggcgtggaaactaccaccccgtccaagcagtccaacaataagtacgcagccagctcctacctgtccctgacccccgaacaatggaagtcacacagatcctactcctgtcaagtcacccacgagggcagcactgtcgaaaagaccgtggcaccgactgagtgctcg

SEQ ID NO: 1106 - protein, 227 aa, Artificial Sequence
  source: /note="Description of Artificial Sequence: Synthetic polypeptide"
DKTHTCPPCPAPELLGGPSVFLFPPKPKDTLMISRTPEVTCVVVDVSHEDPEVKFNWYVDGVEVHNAKTKPREEQYNSTYRVVSVLTVLHQDWLNGKEYKCKVSNKALPAPIEKTISKAKGQPREPQVCTLPPSREEMTKNQVSLSCAVKGFYPSDIAVEWESNGQPENNYKTTPPVLDSDGSFFLVSKLTVDKSRWQQGNVFSCSVMHEALHNHYTQKSLSLSPGK

SEQ ID NO: 1107 - protein, 227 aa, Artificial Sequence
  source: /note="Description of Artificial Sequence: Synthetic polypeptide"
DKTHTCPPCPAPELLGGPSVFLFPPKPKDTLMISRTPEVTCVVVDVSHEDPEVKFNWYVDGVEVHNAKTKPREEQYNSTYRVVSVLTVLHQDWLNGKEYKCKVSNKALPAPIEKTISKAKGQPREPQVYTLPPCREEMTKNQVSLWCLVKGFYPSDIAVEWESNGQPENNYKTTPPVLDSDGSFFLYSKLTVDKSRWQQGNVFSCSVMHEALHNHYTQKSLSLSPGK

SEQ ID NO: 1108 - protein, 227 aa, Artificial Sequence
  source: /note="Description of Artificial Sequence: Synthetic polypeptide"
DKTHTCPPCPAPELLGGPSVFLFPPKPKDTLMISRTPEVTCVVVDVSHEDPEVKFNWYVDGVEVHNAKTKPREEQYNSTYRVVSVLTVLHQDWLNGKEYKCKVSNKALPAPIEKTISKAKGQPREPQVYTLPPCREEMTKNQVSLWCLVKGFYPSDIAVEWESNGQPENNYKTTPPVLDSDGSFFLYSKLTVDKSRWQQGNVFSCSVMHEALHNRYTQKSLSLSPGK

SEQ ID NO: 1109 - protein, 225 aa, Artificial Sequence
  source: /note="Description of Artificial Sequence: Synthetic polypeptide"
DKTHTCPPCPAPELLGGPSVFLFPPKPKDTLMISRTPEVTCVVVDVSHEDPEVKFNWYVDGVEVHNAKTKPREEQYNSTYRVVSVLTVLHQDWLNGKEYKCKVSNKALPAPIEKTISKAKGQPREPQVYTLPPSRDELTKNQVSLTCLVKGFYPSDIAVEWESNGQPENNYKTTPPVLDSDGSFFLYSKLTVDKSRWQQGNVFSCSVMHEALHNHYTQKSLSLSP

SEQ ID NO: 1110 - protein, 215 aa, Artificial Sequence; identical to SEQ ID NO: 759
  source: /note="Description of Artificial Sequence: Synthetic polypeptide"

SEQ ID NO: 1111 - DNA, 645 bp, Artificial Sequence
  source: /note="Description of Artificial Sequence: Synthetic polynucleotide"
gagatcgtgatgacacagtctccagccacactgtccgtgtctccaggcgagagagctacactgagctgtagagccagccaggatgtgggaacagccgtggcctggtatcagcagaaacctggacaagcccctcggctgctgatctactgggcctctacaagacacacaggcatccctgccagattttctggcagcggctctggcaccgagttcaccctgacaatctctagcctccagagcgaggacttcgccgtgtacttctgccagcagtacgccaactttcccctgtacacctttggccagggcaccaagctggaaatcaagagaacagtggccgctccgagcgtgttcatctttccaccaagcgacgagcagctgaaaagcggcacagcctctgtcgtgtgcctgctgaacaacttctaccccagagaagccaaggtgcagtggaaggtggacaatgccctccagtccggcaatagccaagagagcgtgaccgagcaggacagcaaggatagcacatacagcctgagcagcacactgaccctgagcaaggccgactacgagaagcacaaagtgtacgcctgcgaagtgacacaccagggcctgtctagccctgtgaccaagagcttcaacagaggcgagtgc

SEQ ID NO: 1112 - protein, 719 aa, Artificial Sequence
  source: /note="Description of Artificial Sequence: Synthetic polypeptide"
QVQLVQSGAEVKKPGASVKVSCKASGYTFTTYWIQWVRQAPGQRLEWMGAVYPGDADTRYTQKFQGRVTLTADRSASTAYMELSSLRSEDTAVYYCGRDAGLEYYALDYWGQGTLVTVSSASTKGPSVFPLAPSSKSTSGGTAALGCLVKDYFPEPVTVSWNSGALTSGVHTFPAVLQSSGLYSLSSVVTVPSSSLGTQTYICNVNHKPSNTKVDKRVEPKSCGGGGSGGGGSEVQLVESGGGLVQPGGSLKLSCAASGFTFNTYAMNWVRQASGKGLEWVGRIRSKYNNYATYYADSVKDRFTISRDDSKSTLYLQMNSLKTEDTAVYYCVRHGNFGNSYVSWFAYWGQGTLVTVSSGGGGSGGGGSGGGGSGGGGSQAVVTQEPSLTVSPGGTVTLTCRSSTGAVTTSNYANWVQQKPGQAPRGLIGGTNKRAPWTPARFSGSLLGDKAALTLSGAQPEDEAEYFCALWYSNLWVFGGGTKLTVLGGGGSDKTHTCPPCPAPELLGGPSVFLFPPKPKDTLMISRTPEVTCVVVDVSHEDPEVKFNWYVDGVEVHNAKTKPREEQYNSTYRVVSVLTVLHQDWLNGKEYKCKVSNKALPAPIEKTISKAKGQPREPQVCTLPPSREEMTKNQVSLSCAVKGFYPSDIAVEWESNGQPENNYKTTPPVLDSDGSFFLVSKLTVDKSRWQQGNVFSCSVMHEALHNHYTQKSLSLSPGK

SEQ ID NO: 1113 - DNA, 2157 bp, Artificial Sequence
  source: /note="Description of Artificial Sequence: Synthetic polynucleotide"
caggttcaactggttcagagcggagccgaagtgaagaaacctggggccagcgtgaaggtgtcctgtaaagccagcggctacacctttaccacctactggattcagtgggtccgacaggcccctggacagagacttgaatggatgggagctgtgtaccccggcgacgccgataccagatacacccagaaattccagggcagagtgaccctgacagccgatagaagcgccagcacagcctacatggaactgagcagcctgagaagcgaggataccgccgtgtactactgtggcagagatgccggcctggaatattacgccctggactattggggccagggcaccctggttacagtgtcctctgcctctacaaagggcccctccgtttttccactggctcctagcagcaagagcacatctggtggaacagccgctctgggctgcctggtcaaggattactttcctgagcctgtgaccgtgtcctggaatagcggagcactgacaagcggcgtgcacacatttccagccgtgctgcaaagcagcggcctgtactctctgtctagcgtggtcacagtgcctagctctagcctgggcacccagacctacatctgcaacgtgaaccacaagcctagcaacaccaaggtcgacaagagagtggaacccaagtcttgtggtggcggaggatctggcggaggcggatctgaagttcagcttgttgaatctggcggcggactggtgcaacctggcggatctctgaaactgtcttgtgccgcctccggcttcaccttcaatacctacgccatgaactgggttcgacaagcctccggcaaaggactggaatgggtcggacggatcagaagcaagtacaacaactacgccacctactacgccgactccgtgaaggacagattcaccatcagccgggacgactccaagagcaccctgtacctccagatgaactccctgaaaaccgaggacacagccgtctattattgcgtgcggcacggcaacttcggcaacagctatgtgtcttggtttgcctactggggacagggaaccctcgtgaccgtttcttcaggcggcggtggtagtggcggtggtggtagcggaggcggtggatcaggtggcggcggttctcaagctgtggtcacacaagagcccagcctgacagtttctcctggcggaaccgtgacactgacctgtagatctagcaccggcgcagtgaccaccagcaattacgctaactgggtgcagcagaagcccggccaagctcctagaggactgatcggaggcacaaacaagagagccccttggacaccagccagattttctggctctctgctgggcgataaggccgctcttacactgtctggcgcacagcctgaagatgaggccgagtacttttgcgccctgtggtacagcaacctgtgggtgttcggcggaggaacaaagctgacagttcttggaggcggcggaagcgacaagacccacacatgtcctccatgtcctgctccagaactgctcggcggaccctccgtgtttctgttccctccaaagccaaaggacaccctgatgatcagcagaacccctgaagtgacctgcgtggtggtggatgtgtctcacgaggacccagaagtgaagttcaattggtacgtggacggcgtggaagtgcacaacgccaagaccaagcctagagaggaacagtacaacagcacctacagagtggtgtccgtgctgacagtgctgcaccaggactggctgaacggcaaagagtacaagtgcaaggtgtccaacaaggccctgcctgctcctatcgagaaaaccatcagcaaggccaagggccagcctagggaacctcaagtgtgcactctgcctccaagccgggaagagatgaccaagaatcaggtgtccctgagctgcgccgtgaagggcttttacccttccgatatcgccgtggaatgggagagcaatggccagccagagaacaactacaagaccacacctcctgtgctggacagcgacggctcattcttcctggtgtctaagctgaccgtggacaagagcagatggcagcagggcaacgtgttcagctgttctgtgatgcacgaggccctgcacaaccactacacacagaagtccctgtctctgagccccggcaaa

SEQ ID NO: 1114 - protein, 326 aa, Artificial Sequence
  source: /note="Description of Artificial Sequence: Synthetic polypeptide"
SQQIYGVVYGNVTFHVPSNVPLKEVLWKKQKDKVAELENSEFRAFSSFKNRVYLDTVSGSLTIYNLTSSDEDEYEMESPNITDTMKFFLYVLESGGGGSDKTHTCPPCPAPELLGGPSVFLFPPKPKDTLMISRTPEVTCVVVDVSHEDPEVKFNWYVDGVEVHNAKTKPREEQYNSTYRVVSVLTVLHQDWLNGKEYKCKVSNKALPAPIEKTISKAKGQPREPQVYTLPPCREEMTKNQVSLWCLVKGFYPSDIAVEWESNGQPENNYKTTPPVLDSDGSFFLYSKLTVDKSRWQQGNVFSCSVMHEALHNHYTQKSLSLSPGK

SEQ ID NO: 1115 - DNA, 978 bp, Artificial Sequence
  source: /note="Description of Artificial Sequence: Synthetic polynucleotide"
tctcagcagatctatggcgtggtgtacggcaacgtgaccttccacgtgccaagcaacgtgcccctgaaagaggtgctctggaagaaacagaaagacaaggtggccgagctggaaaacagcgagttcagagccttcagcagcttcaagaaccgggtgtacctggataccgtgtccggcagcctgaccatctacaatctgaccagcagcgacgaggacgagtacgagatggaaagccccaacatcaccgacaccatgaagttctttctgtacgtgctggaaagcggcggaggcggctctgataagacacacacatgtcctccatgtcctgctccagagctgctcggcggaccttctgttttcctgtttccacctaagccaaaggacaccctgatgatcagcagaacccctgaagtgacctgcgtggtggtggatgtgtctcacgaggaccccgaagtgaagttcaattggtacgtggacggcgtggaagtgcacaacgccaagaccaagcctagagaggaacagtacaacagcacctacagagtggtgtccgtgctgaccgtgctgcaccaggattggctgaacggcaaagagtacaagtgcaaggtgtccaacaaggccctgcctgctcctatcgagaaaaccatcagcaaggccaagggccagccaagagaaccccaggtttacaccctgcctccatgccgggaagagatgaccaagaatcaggtgtccctgtggtgcctggtcaagggcttctacccttccgatatcgccgtggaatgggagagcaatggccagcctgagaacaactacaagaccacacctcctgtgctggacagcgacggctcattcttcctgtacagcaagctgacagtggacaagagcagatggcagcagggcaacgtgttcagctgttctgtgatgcacgaggccctgcacaaccactacacccagaagtctctgtctctgagccccggcaaa

SEQ ID NO: 1116 - protein, 719 aa, Artificial Sequence; identical to SEQ ID NO: 1077
  source: /note="Description of Artificial Sequence: Synthetic polypeptide"

SEQ ID NO: 1117 - DNA, 2157 bp, Artificial Sequence
  source: /note="Description of Artificial Sequence: Synthetic polynucleotide"
caggttcaactggttcagagcggagccgaagtgaagaaacctggggccagcgtgaaggtgtcctgtaaagccagcggctacacctttaccacctactggattcagtgggtccgacaggcccctggacagagacttgaatggatgggagctgtgtaccccggcgacgccgataccagatacacccagaaattccagggcagagtgaccctgacagccgatagaagcgccagcacagcctacatggaactgagcagcctgagaagcgaggataccgccgtgtactactgtggcagagatgccggcctggaatattacgccctggactattggggccagggcaccctggttacagtgtcctctgcctctacaaagggcccctccgtttttccactggctcctagcagcaagagcacatctggtggaacagccgctctgggctgcctggtcaaggattactttcctgagcctgtgaccgtgtcctggaatagcggagcactgacaagcggcgtgcacacatttccagccgtgctgcaaagcagcggcctgtactctctgtctagcgtggtcacagtgcctagctctagcctgggcacccagacctacatctgcaacgtgaaccacaagcctagcaacaccaaggtcgacaagagagtggaacccaagtcttgtggtggcggaggatctggcggaggcggatctgaagttcagcttgttgaatctggcggcggactggtgcaacctggcggatctctgaaactgtcttgtgccgcctccggcttcaccttcaatacctacgccatgaactgggttcgacaagcctccggcaaaggactggaatgggtcggacggatcagaagcaagtacaacaactacgccacctactacgccgactccgtgaaggacagattcaccatcagccgggacgactccaagagcaccctgtacctccagatgaactccctgaaaaccgaggacacagccgtctattattgcgtgcggcacggcaacttcggcaacagctatgtgtcttggtttgcctactggggacagggaaccctcgtgaccgtttcttcaggcggcggtggtagtggcggtggtggtagcggaggcggtggatcaggtggcggcggttctcaagctgtggtcacacaagagcccagcctgacagtttctcctggcggaaccgtgacactgacctgtagatctagcaccggcgcagtgaccaccagcaattacgctaactgggtgcagcagaagcccggccaagctcctagaggactgatcggaggcacaaacaagagagccccttggacaccagccagattttctggctctctgctgggcgataaggccgctcttacactgtctggcgcacagcctgaagatgaggccgagtacttttgcgccctgtggtacagcaacctgtgggtgttcggcggaggaacaaagctgacagttcttggaggcggcggaagcgacaagacccacacatgtcctccatgtcctgctccagaactgctcggcggaccctccgtgtttctgttccctccaaagccaaaggacaccctgatgatcagcagaacccctgaagtgacctgtgtggtggtggccgtgtctcacgaggacccagaagtgaagttcaattggtacgtggacggcgtggaagtgcacaacgccaagaccaagcctagagaggaacagtacgccagcacctacagagtggtgtctgtgctgacagtgctgcaccaggactggctgaacggcaaagagtacaagtgcaaggtgtccaacaaggccctggccgctcctatcgagaaaaccatctctaaggccaagggccagcctcgggaacctcaagtgtgcactcttccacctagccgggaagagatgaccaagaaccaggtgtcactgagctgcgccgtgaagggcttctacccttctgatatcgccgtggaatgggagagcaacggccagccagagaacaactacaagaccacacctcctgtgctggacagcgacggctcattcttcctggtgtctaagctgaccgtggacaagagcagatggcagcagggcaacgtgttcagctgttctgtgatgcacgaggccctgcacaaccactacacacagaagtccctgtctctgagccccggcaaa

SEQ ID NO: 1118 - protein, 326 aa, Artificial Sequence; identical to SEQ ID NO: 1086
  source: /note="Description of Artificial Sequence: Synthetic polypeptide"

SEQ ID NO: 1119 - DNA, 978 bp, Artificial Sequence
  source: /note="Description of Artificial Sequence: Synthetic polynucleotide"
tctcagcagatctatggcgtggtgtacggcaacgtgaccttccacgtgccaagcaacgtgcccctgaaagaggtgctctggaagaaacagaaagacaaggtggccgagctggaaaacagcgagttcagagccttcagcagcttcaagaaccgggtgtacctggataccgtgtccggcagcctgaccatctacaatctgaccagcagcgacgaggacgagtacgagatggaaagccccaacatcaccgacaccatgaagttctttctgtacgtgctggaaagcggcggaggcggctctgataagacacacacatgtcctccatgtcctgctccagagctgctcggcggaccttctgttttcctgtttccacctaagccaaaggacaccctgatgatcagcagaacccctgaagtgacctgtgtggtggtggccgtgtctcacgaagatcccgaagtgaagttcaattggtacgtggacggcgtggaagtgcacaacgccaagaccaagcctagagaggaacagtacgccagcacctatagagtggtgtccgtgctgacagtgctgcaccaggactggctgaacggcaaagagtacaagtgcaaggtgtccaacaaggccctggccgctcctatcgagaaaaccatctctaaggccaagggccagcctcgggaaccacaggtttacaccctgcctccatgccgggaagagatgaccaagaatcaggtgtccctgtggtgcctggtcaagggcttctacccttccgatatcgccgtggaatgggagagcaatggccagcctgagaacaactacaagaccacacctcctgtgctggacagcgacggctcattcttcctgtacagcaagctgaccgtggacaagagcagatggcagcagggcaacgtgttcagctgttctgtgatgcacgaggccctgcacaaccactacacccagaagtctctgtctctgagccccggcaaa

SEQ ID NO: 1120 - protein, 719 aa, Artificial Sequence
  source: /note="Description of Artificial Sequence: Synthetic polypeptide"
QVQLVQSGAEVKKPGASVKVSCKASGYTFTTYWIQWVRQAPGQRLEWMGAVYPGDADTRYTQKFQGRVTLTADRSASTAYMELSSLRSEDTAVYYCGRDAGLEYYALDYWGQGTLVTVSSASTKGPSVFPLAPSSKSTSGGTAALGCLVKDYFPEPVTVSWNSGALTSGVHTFPAVLQSSGLYSLSSVVTVPSSSLGTQTYICNVNHKPSNTKVDKRVEPKSCGGGGSGGGGSEVQLVESGGGLVQPGGSLKLSCAASGFTFNTYAMNWVRQASGKGLEWVGRIRSKYNNYATYYADSVKDRFTISRDDSKSTLYLQMNSLKTEDTAVYYCVRHGNFGNSYVSWFAYWGQGTLVTVSSGGGGSGGGGSGGGGSGGGGSQAVVTQEPSLTVSPGGTVTLTCRSSTGAVTTSNYANWVQQKPGQAPRGLIGGTNKRAPWTPARFSGSLLGDKAALTLSGAQPEDEAEYFCALWYSNLWVFGGGTKLTVLGGGGSDKTHTCPPCPAPELLGAPSVFLFPPKPKDTLMISRTPEVTCVVVAVKHEDPEVKFNWYVDGVEVHNAKTKPREEQYNSTYRVVSVLTVLHQDWLNGKEYKCKVSNKALAAPIEKTISKAKGQPREPQVCTLPPSREEMTKNQVSLSCAVKGFYPSDIAVEWESNGQPENNYKTTPPVLDSDGSFFLVSKLTVDKSRWQQGNVFSCSVMHEALHNHYTQKSLSLSPGK

SEQ ID NO: 1121 - DNA, 2157 bp, Artificial Sequence
  source: /note="Description of Artificial Sequence: Synthetic polynucleotide"
caggttcaactggttcagagcggagccgaagtgaagaaacctggggccagcgtgaaggtgtcctgtaaagccagcggctacacctttaccacctactggattcagtgggtccgacaggcccctggacagagacttgaatggatgggagctgtgtaccccggcgacgccgataccagatacacccagaaattccagggcagagtgaccctgacagccgatagaagcgccagcacagcctacatggaactgagcagcctgagaagcgaggataccgccgtgtactactgtggcagagatgccggcctggaatattacgccctggactattggggccagggcaccctggttacagtgtcctctgcctctacaaagggcccctccgtttttccactggctcctagcagcaagagcacatctggtggaacagccgctctgggctgcctggtcaaggattactttcctgagcctgtgaccgtgtcctggaatagcggagcactgacaagcggcgtgcacacatttccagccgtgctgcaaagcagcggcctgtactctctgtctagcgtggtcacagtgcctagctctagcctgggcacccagacctacatctgcaacgtgaaccacaagcctagcaacaccaaggtcgacaagagagtggaacccaagtcttgtggtggcggaggatctggcggaggcggatctgaagttcagcttgttgaatctggcggcggactggtgcaacctggcggatctctgaaactgtcttgtgccgcctccggcttcaccttcaatacctacgccatgaactgggttcgacaagcctccggcaaaggactggaatgggtcggacggatcagaagcaagtacaacaactacgccacctactacgccgactccgtgaaggacagattcaccatcagccgggacgactccaagagcaccctgtacctccagatgaactccctgaaaaccgaggacacagccgtctattattgcgtgcggcacggcaacttcggcaacagctatgtgtcttggtttgcctactggggacagggaaccctcgtgaccgtttcttcaggcggcggtggtagtggcggtggtggtagcggaggcggtggatcaggtggcggcggttctcaagctgtggtcacacaagagcccagcctgacagtttctcctggcggaaccgtgacactgacctgtagatctagcaccggcgcagtgaccaccagcaattacgctaactgggtgcagcagaagcccggccaagctcctagaggactgatcggaggcacaaacaagagagccccttggacaccagccagattttctggctctctgctgggcgataaggccgctcttacactgtctggcgcacagcctgaagatgaggccgagtacttttgcgccctgtggtacagcaacctgtgggtgttcggcggaggaacaaagctgacagttcttggaggcggcggaagcgacaagacccacacatgtcctccatgtcctgctccagaactgctgggagcccctagcgttttcctgtttcctccaaagccaaaggacaccctgatgatcagcagaacccctgaagtgacctgtgtggtggtggccgtgaagcacgaggacccagaagtgaagttcaattggtacgtggacggcgtggaagtgcacaacgccaagaccaagcctagagaggaacagtacaacagcacctacagagtggtgtccgtgctgacagtgctgcaccaggactggctgaacggcaaagagtacaagtgcaaggtgtccaacaaggccctggccgctcctatcgagaaaaccatctctaaggccaagggccagcctcgggaacctcaagtgtgcactcttccacctagccgggaagagatgaccaagaaccaggtgtcactgagctgcgccgtgaagggcttctacccttctgatatcgccgtggaatgggagagcaacggccagccagagaacaactacaagaccacacctcctgtgctggacagcgacggctcattcttcctggtgtctaagctgaccgtggacaagagcagatggcagcagggcaacgtgttcagctgttctgtgatgcacgaggccctgcacaaccactacacacagaagtccctgtctctgagccccggcaaa

SEQ ID NO: 1122 - protein, 326 aa, Artificial Sequence
  source: /note="Description of Artificial Sequence: Synthetic polypeptide"
SQQIYGVVYGNVTFHVPSNVPLKEVLWKKQKDKVAELENSEFRAFSSFKNRVYLDTVSGSLTIYNLTSSDEDEYEMESPNITDTMKFFLYVLESGGGGSDKTHTCPPCPAPELLGAPSVFLFPPKPKDTLMISRTPEVTCVVVAVKHEDPEVKFNWYVDGVEVHNAKTKPREEQYNSTYRVVSVLTVLHQDWLNGKEYKCKVSNKALAAPIEKTISKAKGQPREPQVYTLPPCREEMTKNQVSLWCLVKGFYPSDIAVEWESNGQPENNYKTTPPVLDSDGSFFLYSKLTVDKSRWQQGNVFSCSVMHEALHNHYTQKSLSLSPGK

SEQ ID NO: 1123 - DNA, 978 bp, Artificial Sequence
  source: /note="Description of Artificial Sequence: Synthetic polynucleotide"
tctcagcagatctatggcgtggtgtacggcaacgtgaccttccacgtgccaagcaacgtgcccctgaaagaggtgctctggaagaaacagaaagacaaggtggccgagctggaaaacagcgagttcagagccttcagcagcttcaagaaccgggtgtacctggataccgtgtccggcagcctgaccatctacaatctgaccagcagcgacgaggacgagtacgagatggaaagccccaacatcaccgacaccatgaagttctttctgtacgtgctggaaagcggcggaggcggctctgataagacacacacatgtcctccatgtcctgctccagaactgctgggagcccctagcgttttcctgtttcctccaaagccaaaggacaccctgatgatcagcagaacccctgaagtgacctgtgtggtggtggccgtgaagcacgaagatcccgaagtgaagttcaattggtacgtggacggcgtggaagtgcacaacgccaagaccaagcctagagaggaacagtacaacagcacctacagagtggtgtccgtgctgaccgtgctgcaccaggattggctgaacggcaaagagtacaagtgcaaggtgtccaacaaggccctggccgctcctatcgagaaaaccatctctaaggccaagggccagcctcgggaaccacaggtttacaccctgcctccatgccgggaagagatgaccaagaatcaggtgtccctgtggtgcctggtcaagggcttctacccttccgatatcgccgtggaatgggagagcaatggccagcctgagaacaactacaagaccacacctcctgtgctggacagcgacggctcattcttcctgtacagcaagctgacagtggacaagagcagatggcagcagggcaacgtgttcagctgttctgtgatgcacgaggccctgcacaaccactacacccagaagtctctgtctctgagccccggcaaa

SEQ ID NO: 1124 - protein, 719 aa, Artificial Sequence
  source: /note="Description of Artificial Sequence: Synthetic polypeptide"
QVQLVQSGAEVKKPGASVKVSCKASGYTFTTYWIQWVRQAPGQRLEWMGAVYPGDADTRYTQKFQGRVTLTADRSASTAYMELSSLRSEDTAVYYCGRDAGLEYYALDYWGQGTLVTVSSASTKGPSVFPLAPSSKSTSGGTAALGCLVKDYFPEPVTVSWNSGALTSGVHTFPAVLQSSGLYSLSSVVTVPSSSLGTQTYICNVNHKPSNTKVDKRVEPKSCGGGGSGGGGSEVQLVESGGGLVQPGGSLKLSCAASGFTFNTYAMNWVRQASGKGLEWVGRIRSKYNNYATYYADSVKDRFTISRDDSKSTLYLQMNSLKTEDTAVYYCVRHGNFGNSYVSWFAYWGQGTLVTVSSGGGGSGGGGSGGGGSGGGGSQAVVTQEPSLTVSPGGTVTLTCRSSTGAVTTSNYANWVQQKPGQAPRGLIGGTNKRAPWTPARFSGSLLGDKAALTLSGAQPEDEAEYFCALWYSNLWVFGGGTKLTVLGGGGSDKTHTCPPCPAPEAAGGPSVFLFPPKPKDTLMISRTPEVTCVVVDVSHEDPEVKFNWYVDGVEVHNAKTKPREEQYNSTYRVVSVLTVLHQDWLNGKEYKCKVSNKALPAPIEKTISKAKGQPREPQVCTLPPSREEMTKNQVSLSCAVKGFYPSDIAVEWESNGQPENNYKTTPPVLDSDGSFFLVSKLTVDKSRWQQGNVFSCSVMHEALHNHYTQKSLSLSPGK

SEQ ID NO: 1125 - DNA, 2157 bp, Artificial Sequence
  source: /note="Description of Artificial Sequence: Synthetic polynucleotide"
caggttcaactggttcagagcggagccgaagtgaagaaacctggggccagcgtgaaggtgtcctgtaaagccagcggctacacctttaccacctactggattcagtgggtccgacaggcccctggacagagacttgaatggatgggagctgtgtaccccggcgacgccgataccagatacacccagaaattccagggcagagtgaccctgacagccgatagaagcgccagcacagcctacatggaactgagcagcctgagaagcgaggataccgccgtgtactactgtggcagagatgccggcctggaatattacgccctggactattggggccagggcaccctggttacagtgtcctctgcctctacaaagggcccctccgtttttccactggctcctagcagcaagagcacatctggtggaacagccgctctgggctgcctggtcaaggattactttcctgagcctgtgaccgtgtcctggaatagcggagcactgacaagcggcgtgcacacatttccagccgtgctgcaaagcagcggcctgtactctctgtctagcgtggtcacagtgcctagctctagcctgggcacccagacctacatctgcaacgtgaaccacaagcctagcaacaccaaggtcgacaagagagtggaacccaagtcttgtggtggcggaggatctggcggaggcggatctgaagttcagcttgttgaatctggcggcggactggtgcaacctggcggatctctgaaactgtcttgtgccgcctccggcttcaccttcaatacctacgccatgaactgggttcgacaagcctccggcaaaggactggaatgggtcggacggatcagaagcaagtacaacaactacgccacctactacgccgactccgtgaaggacagattcaccatcagccgggacgactccaagagcaccctgtacctccagatgaactccctgaaaaccgaggacacagccgtctattattgcgtgcggcacggcaacttcggcaacagctatgtgtcttggtttgcctactggggacagggaaccctcgtgaccgtttcttcaggcggcggtggtagtggcggtggtggtagcggaggcggtggatcaggtggcggcggttctcaagctgtggtcacacaagagcccagcctgacagtttctcctggcggaaccgtgacactgacctgtagatctagcaccggcgcagtgaccaccagcaattacgctaactgggtgcagcagaagcccggccaagctcctagaggactgatcggaggcacaaacaagagagccccttggacaccagccagattttctggctctctgctgggcgataaggccgctcttacactgtctggcgcacagcctgaagatgaggccgagtacttttgcgccctgtggtacagcaacctgtgggtgttcggcggaggaacaaagctgacagttcttggaggcggcggaagcgacaagacccacacatgtcctccatgtcctgctccagaagctgctggcggaccctccgtgtttctgttccctccaaagccaaaggacaccctgatgatcagcagaacccctgaagtgacctgcgtggtggtggatgtgtctcacgaggacccagaagtgaagttcaattggtacgtggacggcgtggaagtgcacaacgccaagaccaagcctagagaggaacagtacaacagcacctacagagtggtgtccgtgctgacagtgctgcaccaggactggctgaacggcaaagagtacaagtgcaaggtgtccaacaaggccctgcctgctcctatcgagaaaaccatcagcaaggccaagggccagcctagggaacctcaagtgtgcactctgcctccaagccgggaagagatgaccaagaatcaggtgtccctgagctgcgccgtgaagggcttttacccttccgatatcgccgtggaatgggagagcaatggccagccagagaacaactacaagaccacacctcctgtgctggacagcgacggctcattcttcctggtgtctaagctgaccgtggacaagagcagatggcagcagggcaacgtgttcagctgttctgtgatgcacgaggccctgcacaaccactacacacagaagtccctgtctctgagccccggcaaa

SEQ ID NO: 1126 - protein, 326 aa, Artificial Sequence
  source: /note="Description of Artificial Sequence: Synthetic polypeptide"
SQQIYGVVYGNVTFHVPSNVPLKEVLWKKQKDKVAELENSEFRAFSSFKNRVYLDTVSGSLTIYNLTSSDEDEYEMESPNITDTMKFFLYVLESGGGGSDKTHTCPPCPAPEAAGGPSVFLFPPKPKDTLMISRTPEVTCVVVDVSHEDPEVKFNWYVDGVEVHNAKTKPREEQYNSTYRVVSVLTVLHQDWLNGKEYKCKVSNKALPAPIEKTISKAKGQPREPQVYTLPPCREEMTKNQVSLWCLVKGFYPSDIAVEWESNGQPENNYKTTPPVLDSDGSFFLYSKLTVDKSRWQQGNVFSCSVMHEALHNHYTQKSLSLSPGK

SEQ ID NO: 1127 - protein, 719 aa, Artificial Sequence
  source: /note="Description of Artificial Sequence: Synthetic polypeptide"
QVQLVQSGAEVKKPGASVKVSCKASGYTFTTYWIQWVRQAPGQRLEWMGAVYPGDADTRYTQKFQGRVTLTADRSASTAYMELSSLRSEDTAVYYCGRDAGLEYYALDYWGQGTLVTVSSASTKGPSVFPLAPSSKSTSGGTAALGCLVKDYFPEPVTVSWNSGALTSGVHTFPAVLQSSGLYSLSSVVTVPSSSLGTQTYICNVNHKPSNTKVDKRVEPKSCGGGGSGGGGSEVQLVESGGGLVQPGGSLKLSCAASGFTFNTYAMNWVRQASGKGLEWVGRIRSKYNNYATYYADSVKDRFTISRDDSKSTLYLQMNSLKTEDTAVYYCVRHGNFGNSYVSWFAYWGQGTLVTVSSGGGGSGGGGSGGGGSGGGGSQAVVTQEPSLTVSPGGTVTLTCRSSTGAVTTSNYANWVQQKPGQAPRGLIGGTNKRAPWTPARFSGSLLGDKAALTLSGAQPEDEAEYFCALWYSNLWVFGGGTKLTVLGGGGSDKTHTCPPCPAPEAAGGPSVFLFPPKPKDTLMISRTPEVTCVVVDVKHEDPEVKFNWYVDGVEVHNAKTKPREEQYNSTYRVVSVLTVLHQDWLNGKEYKCKVSNKALAAPIEKTISKAKGQPREPQVCTLPPSREEMTKNQVSLSCAVKGFYPSDIAVEWESNGQPENNYKTTPPVLDSDGSFFLVSKLTVDKSRWQQGNVFSCSVMHEALHNHYTQKSLSLSPGK

SEQ ID NO: 1128 - DNA, 2157 bp, Artificial Sequence
  source: /note="Description of Artificial Sequence: Synthetic polynucleotide"
caggttcaactggttcagagcggagccgaagtgaagaaacctggggccagcgtgaaggtgtcctgtaaagccagcggctacacctttaccacctactggattcagtgggtccgacaggcccctggacagagacttgaatggatgggagctgtgtaccccggcgacgccgataccagatacacccagaaattccagggcagagtgaccctgacagccgatagaagcgccagcacagcctacatggaactgagcagcctgagaagcgaggataccgccgtgtactactgtggcagagatgccggcctggaatattacgccctggactattggggccagggcaccctggttacagtgtcctctgcctctacaaagggcccctccgtttttccactggctcctagcagcaagagcacatctggtggaacagccgctctgggctgcctggtcaaggattactttcctgagcctgtgaccgtgtcctggaatagcggagcactgacaagcggcgtgcacacatttccagccgtgctgcaaagcagcggcctgtactctctgtctagcgtggtcacagtgcctagctctagcctgggcacccagacctacatctgcaacgtgaaccacaagcctagcaacaccaaggtcgacaagagagtggaacccaagtcttgtggtggcggaggatctggcggaggcggatctgaagttcagcttgttgaatctggcggcggactggtgcaacctggcggatctctgaaactgtcttgtgccgcctccggcttcaccttcaatacctacgccatgaactgggttcgacaagcctccggcaaaggactggaatgggtcggacggatcagaagcaagtacaacaactacgccacctactacgccgactccgtgaaggacagattcaccatcagccgggacgactccaagagcaccctgtacctccagatgaactccctgaaaaccgaggacacagccgtctattattgcgtgcggcacggcaacttcggcaacagctatgtgtcttggtttgcctactggggacagggaaccctcgtgaccgtttcttcaggcggcggtggtagtggcggtggtggtagcggaggcggtggatcaggtggcggcggttctcaagctgtggtcacacaagagcccagcctgacagtttctcctggcggaaccgtgacactgacctgtagatctagcaccggcgcagtgaccaccagcaattacgctaactgggtgcagcagaagcccggccaagctcctagaggactgatcggaggcacaaacaagagagccccttggacaccagccagattttctggctctctgctgggcgataaggccgctcttacactgtctggcgcacagcctgaagatgaggccgagtacttttgcgccctgtggtacagcaacctgtgggtgttcggcggaggaacaaagctgacagttcttggaggcggcggaagcgacaagacccacacatgtcctccatgtcctgctccagaagctgctggcggaccctccgtgtttctgttccctccaaagccaaaggacaccctgatgatcagcagaacccctgaagtgacctgcgtggtggtggatgtgaagcacgaggacccagaagtgaagttcaattggtacgtggacggcgtggaagtgcacaacgccaagaccaagcctagagaggaacagtacaacagcacctacagagtggtgtccgtgctgacagtgctgcaccaggactggctgaacggcaaagagtacaagtgcaaggtgtccaacaaggccctggccgctcctatcgagaaaaccatctctaaggccaagggccagcctcgggaacctcaagtgtgcactcttccacctagccgggaagagatgaccaagaaccaggtgtcactgagctgcgccgtgaagggcttctacccttctgatatcgccgtggaatgggagagcaacggccagccagagaacaactacaagaccacacctcctgtgctggacagcgacggctcattcttcctggtgtctaagctgaccgtggacaagagcagatggcagcagggcaacgtgttcagctgtagcgtgatgcacgaggccctgcacaaccactacacacagaagtccctgtctctgagccccggcaaa

SEQ ID NO: 1129 - protein, 326 aa, Artificial Sequence
  source: /note="Description of Artificial Sequence: Synthetic polypeptide"
SQQIYGVVYGNVTFHVPSNVPLKEVLWKKQKDKVAELENSEFRAFSSFKNRVYLDTVSGSLTIYNLTSSDEDEYEMESPNITDTMKFFLYVLESGGGGSDKTHTCPPCPAPEAAGGPSVFLFPPKPKDTLMISRTPEVTCVVVDVKHEDPEVKFNWYVDGVEVHNAKTKPREEQYNSTYRVVSVLTVLHQDWLNGKEYKCKVSNKALAAPIEKTISKAKGQPREPQVYTLPPCREEMTKNQVSLWCLVKGFYPSDIAVEWESNGQPENNYKTTPPVLDSDGSFFLYSKLTVDKSRWQQGNVFSCSVMHEALHNHYTQKSLSLSPGK

SEQ ID NO: 1130 - DNA, 978 bp, Artificial Sequence
  source: /note="Description of Artificial Sequence: Synthetic polynucleotide"
tctcagcagatctatggcgtggtgtacggcaacgtgaccttccacgtgccaagcaacgtgcccctgaaagaggtgctctggaagaaacagaaagacaaggtggccgagctggaaaacagcgagttcagagccttcagcagcttcaagaaccgggtgtacctggataccgtgtccggcagcctgaccatctacaatctgaccagcagcgacgaggacgagtacgagatggaaagccccaacatcaccgacaccatgaagttctttctgtacgtgctggaaagcggcggaggcggctctgataagacacacacatgtcctccatgtcctgctccagaagcagctggcggaccctctgttttcctgtttccacctaagccaaaggacaccctgatgatcagcagaacccctgaagtgacctgcgtggtggtggatgtgaagcacgaggaccccgaagtgaagttcaattggtacgtggacggcgtggaagtgcacaacgccaagaccaagcctagagaggaacagtacaacagcacctacagagtggtgtccgtgctgaccgtgctgcaccaggattggctgaacggcaaagagtacaagtgcaaggtgtccaacaaggccctggccgctcctatcgagaaaaccatctctaaggccaagggccagcctcgggaaccacaggtttacaccctgcctccatgccgggaagagatgaccaagaatcaggtgtccctgtggtgcctggtcaagggcttctacccttccgatatcgccgtggaatgggagagcaatggccagcctgagaacaactacaagaccacacctcctgtgctggacagcgacggctcattcttcctgtacagcaagctgacagtggacaagagcagatggcagcagggcaacgtgttcagctgtagcgtgatgcacgaggccctgcacaaccactacacccagaagtctctgtctctgagccccggcaaa

SEQ ID NO: 1131 - protein, 719 aa, Artificial Sequence
  source: /note="Description of Artificial Sequence: Synthetic polypeptide"
QVQLVQSGAEVKKPGASVKVSCKASGYTFTTYWIQWVRQAPGQRLEWMGAVYPGDADTRYTQKFQGRVTLTADRSASTAYMELSSLRSEDTAVYYCGRDAGLEYYALDYWGQGTLVTVSSASTKGPSVFPLAPSSKSTSGGTAALGCLVKDYFPEPVTVSWNSGALTSGVHTFPAVLQSSGLYSLSSVVTVPSSSLGTQTYICNVNHKPSNTKVDKRVEPKSCGGGGSGGGGSEVQLVESGGGLVQPGGSLKLSCAASGFTFNTYAMNWVRQASGKGLEWVGRIRSKYNNYATYYADSVKDRFTISRDDSKSTLYLQMNSLKTEDTAVYYCVRHGNFGNSYVSWFAYWGQGTLVTVSSGGGGSGGGGSGGGGSGGGGSQAVVTQEPSLTVSPGGTVTLTCRSSTGAVTTSNYANWVQQKPGQAPRGLIGGTNKRAPWTPARFSGSLLGDKAALTLSGAQPEDEAEYFCALWYSNLWVFGGGTKLTVLGGGGSDKTHTCPPCPAPELLGGPSVFLFPPKPKDTLMISRTPEVTCVVVAVSHEDPEVKFNWYVDGVEVHNAKTKPREEQYASTYRVVSVLTVLHQDWLNGKEYKCKVSNKALAAPIEKTISKAKGQPREPQVYTLPPCREEMTKNQVSLWCLVKGFYPSDIAVEWESNGQPENNYKTTPPVLDSDGSFFLYSKLTVDKSRWQQGNVFSCSVMHEALHNHYTQKSLSLSPGK

SEQ ID NO: 1132 - protein, 215 aa, Artificial Sequence; identical to SEQ ID NO: 759
  source: /note="Description of Artificial Sequence: Synthetic polypeptide"

SEQ ID NO: 1133 - protein, 326 aa, Artificial Sequence
  source: /note="Description of Artificial Sequence: Synthetic polypeptide"
SQQIYGVVYGNVTFHVPSNVPLKEVLWKKQKDKVAELENSEFRAFSSFKNRVYLDTVSGSLTIYNLTSSDEDEYEMESPNITDTMKFFLYVLESGGGGSDKTHTCPPCPAPELLGGPSVFLFPPKPKDTLMISRTPEVTCVVVAVSHEDPEVKFNWYVDGVEVHNAKTKPREEQYASTYRVVSVLTVLHQDWLNGKEYKCKVSNKALAAPIEKTISKAKGQPREPQVCTLPPSREEMTKNQVSLSCAVKGFYPSDIAVEWESNGQPENNYKTTPPVLDSDGSFFLVSKLTVDKSRWQQGNVFSCSVMHEALHNHYTQKSLSLSPGK

SEQ ID NO: 1134 - protein, 719 aa, Artificial Sequence
  source: /note="Description of Artificial Sequence: Synthetic polypeptide"
QVQLVQSGAEVKKPGASVKVSCKASGYTFTTYWIQWVRQAPGQRLEWMGAVYPGDADTRYTQKFQGRVTLTADRSASTAYMELSSLRSEDTAVYYCGRDAGLEYYALDYWGQGTLVTVSSASTKGPSVFPLAPSSKSTSGGTAALGCLVKDYFPEPVTVSWNSGALTSGVHTFPAVLQSSGLYSLSSVVTVPSSSLGTQTYICNVNHKPSNTKVDKRVEPKSCGGGGSGGGGSEVQLVESGGGLVQPGGSLKLSCAASGFTFNTYAMNWVRQASGKGLEWVGRIRSKYNNYATYYADSVKDRFTISRDDSKSTLYLQMNSLKTEDTAVYYCVRHGNFGNSYVSWFAYWGQGTLVTVSSGGGGSGGGGSGGGGSGGGGSQAVVTQEPSLTVSPGGTVTLTCRSSTGAVTTSNYANWVQQKPGQAPRGLIGGTNKRAPWTPARFSGSLLGDKAALTLSGAQPEDEAEYFCALWYSNLWVFGGGTKLTVLGGGGSDKTHTCPPCPAPEAAGAPSVFLFPPKPKDTLMISRTPEVTCVVVDVSHEDPEVKFNWYVDGVEVHNAKTKPREEQYNSTYRVVSVLTVLHQDWLNGKEYKCKVSNKALPAPIEKTISKAKGQPREPQVCTLPPSREEMTKNQVSLSCAVKGFYPSDIAVEWESNGQPENNYKTTPPVLDSDGSFFLVSKLTVDKSRWQQGNVFSCSVMHEALHNHYTQKSLSLSPGK

SEQ ID NO: 1135 - protein, 326 aa, Artificial Sequence
  source: /note="Description of Artificial Sequence: Synthetic polypeptide"
SQQIYGVVYGNVTFHVPSNVPLKEVLWKKQKDKVAELENSEFRAFSSFKNRVYLDTVSGSLTIYNLTSSDEDEYEMESPNITDTMKFFLYVLESGGGGSDKTHTCPPCPAPEAAGAPSVFLFPPKPKDTLMISRTPEVTCVVVDVSHEDPEVKFNWYVDGVEVHNAKTKPREEQYNSTYRVVSVLTVLHQDWLNGKEYKCKVSNKALPAPIEKTISKAKGQPREPQVYTLPPCREEMTKNQVSLWCLVKGFYPSDIAVEWESNGQPENNYKTTPPVLDSDGSFFLYSKLTVDKSRWQQGNVFSCSVMHEALHNHYTQKSLSLSPGK

SEQ ID NO: 1136 - protein, 719 aa, Artificial Sequence
  source: /note="Description of Artificial Sequence: Synthetic polypeptide"
QVQLVQSGAEVKKPGASVKVSCKASGYTFTTYWIQWVRQAPGQRLEWMGAVYPGDADTRYTQKFQGRVTLTADRSASTAYMELSSLRSEDTAVYYCGRDAGLEYYALDYWGQGTLVTVSSASTKGPSVFPLAPSSKSTSGGTAALGCLVKDYFPEPVTVSWNSGALTSGVHTFPAVLQSSGLYSLSSVVTVPSSSLGTQTYICNVNHKPSNTKVDKRVEPKSCGGGGSGGGGSEVQLVESGGGLVQPGGSLKLSCAASGFTFNTYAMNWVRQASGKGLEWVGRIRSKYNNYATYYADSVKDRFTISRDDSKSTLYLQMNSLKTEDTAVYYCVRHGNFGNSYVSWFAYWGQGTLVTVSSGGGGSGGGGSGGGGSGGGGSQAVVTQEPSLTVSPGGTVTLTCRSSTGAVTTSNYANWVQQKPGQAPRGLIGGTNKRAPWTPARFSGSLLGDKAALTLSGAQPEDEAEYFCALWYSNLWVFGGGTKLTVLGGGGSDKTHTCPPCPAPELLGGPSVFLFPPKPKDTLMISRTPEVTCVVVAVKHEDPEVKFNWYVDGVEVHNAKTKPREEQYNSTYRVVSVLTVLHQDWLNGKEYKCKVSNKALAAPIEKTISKAKGQPREPQVCTLPPSREEMTKNQVSLSCAVKGFYPSDIAVEWESNGQPENNYKTTPPVLDSDGSFFLVSKLTVDKSRWQQGNVFSCSVMHEALHNHYTQKSLSLSPGK

SEQ ID NO: 1137 - protein, 326 aa, Artificial Sequence
  source: /note="Description of Artificial Sequence: Synthetic polypeptide"
SQQIYGVVYGNVTFHVPSNVPLKEVLWKKQKDKVAELENSEFRAFSSFKNRVYLDTVSGSLTIYNLTSSDEDEYEMESPNITDTMKFFLYVLESGGGGSDKTHTCPPCPAPELLGGPSVFLFPPKPKDTLMISRTPEVTCVVVAVKHEDPEVKFNWYVDGVEVHNAKTKPREEQYNSTYRVVSVLTVLHQDWLNGKEYKCKVSNKALAAPIEKTISKAKGQPREPQVYTLPPCREEMTKNQVSLWCLVKGFYPSDIAVEWESNGQPENNYKTTPPVLDSDGSFFLYSKLTVDKSRWQQGNVFSCSVMHEALHNHYTQKSLSLSPGK

SEQ ID NO: 1138 - protein, 719 aa, Artificial Sequence
  source: /note="Description of Artificial Sequence: Synthetic polypeptide"
QVQLVQSGAEVKKPGASVKVSCKASGYTFTTYWIQWVRQAPGQRLEWMGAVYPGDADTRYTQKFQGRVTLTADRSASTAYMELSSLRSEDTAVYYCGRDAGLEYYALDYWGQGTLVTVSSASTKGPSVFPLAPSSKSTSGGTAALGCLVKDYFPEPVTVSWNSGALTSGVHTFPAVLQSSGLYSLSSVVTVPSSSLGTQTYICNVNHKPSNTKVDKRVEPKSCGGGGSGGGGSEVQLVESGGGLVQPGGSLKLSCAASGFTFNTYAMNWVRQASGKGLEWVGRIRSKYNNYATYYADSVKDRFTISRDDSKSTLYLQMNSLKTEDTAVYYCVRHGNFGNSYVSWFAYWGQGTLVTVSSGGGGSGGGGSGGGGSGGGGSQAVVTQEPSLTVSPGGTVTLTCRSSTGAVTTSNYANWVQQKPGQAPRGLIGGTNKRAPWTPARFSGSLLGDKAALTLSGAQPEDEAEYFCALWYSNLWVFGGGTKLTVLGGGGSDKTHTCPPCPAPELLGAPSVFLFPPKPKDTLMISRTPEVTCVVVAVSHEDPEVKFNWYVDGVEVHNAKTKPREEQYNSTYRVVSVLTVLHQDWLNGKEYKCKVSNKALAAPIEKTISKAKGQPREPQVCTLPPSREEMTKNQVSLSCAVKGFYPSDIAVEWESNGQPENNYKTTPPVLDSDGSFFLVSKLTVDKSRWQQGNVFSCSVMHEALHNHYTQKSLSLSPGK

SEQ ID NO: 1139 - protein, 326 aa, Artificial Sequence
  source: /note="Description of Artificial Sequence: Synthetic polypeptide"
SQQIYGVVYGNVTFHVPSNVPLKEVLWKKQKDKVAELENSEFRAFSSFKNRVYLDTVSGSLTIYNLTSSDEDEYEMESPNITDTMKFFLYVLESGGGGSDKTHTCPPCPAPELLGAPSVFLFPPKPKDTLMISRTPEVTCVVVAVSHEDPEVKFNWYVDGVEVHNAKTKPREEQYNSTYRVVSVLTVLHQDWLNGKEYKCKVSNKALAAPIEKTISKAKGQPREPQVYTLPPCREEMTKNQVSLWCLVKGFYPSDIAVEWESNGQPENNYKTTPPVLDSDGSFFLYSKLTVDKSRWQQGNVFSCSVMHEALHNHYTQKSLSLSPGK

SEQ ID NO: 1140 - protein, 719 aa, Artificial Sequence
  source: /note="Description of Artificial Sequence: Synthetic polypeptide"
QVQLVQSGAEVKKPGASVKVSCKASGYTFTTYWIQWVRQAPGQRLEWMGAVYPGDADTRYTQKFQGRVTLTADRSASTAYMELSSLRSEDTAVYYCGRDAGLEYYALDYWGQGTLVTVSSASTKGPSVFPLAPSSKSTSGGTAALGCLVKDYFPEPVTVSWNSGALTSGVHTFPAVLQSSGLYSLSSVVTVPSSSLGTQTYICNVNHKPSNTKVDKRVEPKSCGGGGSGGGGSEVQLVESGGGLVQPGGSLKLSCAASGFTFNTYAMNWVRQASGKGLEWVGRIRSKYNNYATYYADSVKDRFTISRDDSKSTLYLQMNSLKTEDTAVYYCVRHGNFGNSYVSWFAYWGQGTLVTVSSGGGGSGGGGSGGGGSGGGGSQAVVTQEPSLTVSPGGTVTLTCRSSTGAVTTSNYANWVQQKPGQAPRGLIGGTNKRAPWTPARFSGSLLGDKAALTLSGAQPEDEAEYFCALWYSNLWVFGGGTKLTVLGGGGSDKTHTCPPCPAPEAAGGPSVFLFPPKPKDTLMISRTPEVTCVVVDVSHEDPEVKFNWYVDGVEVHNAKTKPREEQYNSTYRVVSVLTVLHQDWLNGKEYKCKVSNKALGAPIEKTISKAKGQPREPQVCTLPPSREEMTKNQVSLSCAVKGFYPSDIAVEWESNGQPENNYKTTPPVLDSDGSFFLVSKLTVDKSRWQQGNVFSCSVMHEALHNHYTQKSLSLSPGK

SEQ ID NO: 1141 - protein, 326 aa, Artificial Sequence
  source: /note="Description of Artificial Sequence: Synthetic polypeptide"
SQQIYGVVYGNVTFHVPSNVPLKEVLWKKQKDKVAELENSEFRAFSSFKNRVYLDTVSGSLTIYNLTSSDEDEYEMESPNITDTMKFFLYVLESGGGGSDKTHTCPPCPAPEAAGGPSVFLFPPKPKDTLMISRTPEVTCVVVDVSHEDPEVKFNWYVDGVEVHNAKTKPREEQYNSTYRVVSVLTVLHQDWLNGKEYKCKVSNKALGAPIEKTISKAKGQPREPQVYTLPPCREEMTKNQVSLWCLVKGFYPSDIAVEWESNGQPENNYKTTPPVLDSDGSFFLYSKLTVDKSRWQQGNVFSCSVMHEALHNHYTQKSLSLSPGK

SEQ ID NO: 1142 - protein, 719 aa, Artificial Sequence
  source: /note="Description of Artificial Sequence: Synthetic polypeptide"
QVQLVQSGAEVKKPGASVKVSCKASGYTFTTYWIQWVRQAPGQRLEWMGAVYPGDADTRYTQKFQGRVTLTADRSASTAYMELSSLRSEDTAVYYCGRDAGLEYYALDYWGQGTLVTVSSASTKGPSVFPLAPSSKSTSGGTAALGCLVKDYFPEPVTVSWNSGALTSGVHTFPAVLQSSGLYSLSSVVTVPSSSLGTQTYICNVNHKPSNTKVDKRVEPKSCGGGGSGGGGSEVQLVESGGGLVQPGGSLKLSCAASGFTFNTYAMNWVRQASGKGLEWVGRIRSKYNNYATYYADSVKDRFTISRDDSKSTLYLQMNSLKTEDTAVYYCVRHGNFGNSYVSWFAYWGQGTLVTVSSGGGGSGGGGSGGGGSGGGGSQAVVTQEPSLTVSPGGTVTLTCRSSTGAVTTSNYANWVQQKPGQAPRGLIGGTNKRAPWTPARFSGSLLGDKAALTLSGAQPEDEAEYFCALWYSNLWVFGGGTKLTVLGGGGSDKTHTCPPCPAPEAAGGPSVFLFPPKPKDTLMISRTPEVTCVVVDVSHEDPEVKFNWYVDGVEVHNAKTKPREEQYNSTYRVVSVLTVLHQDWLNGKEYKCKVSNKALAAPIEKTISKAKGQPREPQVCTLPPSREEMTKNQVSLSCAVKGFYPSDIAVEWESNGQPENNYKTTPPVLDSDGSFFLVSKLTVDKSRWQQGNVFSCSVMHEALHNHYTQKSLSLSPGK

SEQ ID NO: 1143 - protein, 326 aa, Artificial Sequence
  source: /note="Description of Artificial Sequence: Synthetic polypeptide"
SQQIYGVVYGNVTFHVPSNVPLKEVLWKKQKDKVAELENSEFRAFSSFKNRVYLDTVSGSLTIYNLTSSDEDEYEMESPNITDTMKFFLYVLESGGGGSDKTHTCPPCPAPEAAGGPSVFLFPPKPKDTLMISRTPEVTCVVVDVSHEDPEVKFNWYVDGVEVHNAKTKPREEQYNSTYRVVSVLTVLHQDWLNGKEYKCKVSNKALAAPIEKTISKAKGQPREPQVYTLPPCREEMTKNQVSLWCLVKGFYPSDIAVEWESNGQPENNYKTTPPVLDSDGSFFLYSKLTVDKSRWQQGNVFSCSVMHEALHNHYTQKSLSLSPGK

SEQ ID NO: 1144 - protein, 217 aa, Artificial Sequence
  source: /note="Description of Artificial Sequence: Synthetic polypeptide"
APEAAGGPSVFLFPPKPKDTLMISRTPEVTCVVVDVSHEDPEVKFNWYVDGVEVHNAKTKPREEQYNSTYRVVSVLTVLHQDWLNGKEYKCKVSNKALAAPIEKTISKAKGQPREPQVYTLPPSRDELTKNQVSLTCLVKGFYPSDIAVEWESNGQPENNYKTTPPVLDSDGSFFLYSKLTVDKSRWQQGNVFSCSVMHEALHNHYTQKSLSLSPGK

SEQ ID NO: 1145 - DNA, 651 bp, Artificial Sequence
  source: /note="Description of Artificial Sequence: Synthetic polynucleotide"
gcccctgaagccgccggcggaccctccgtgttcctgttccccccaaagcccaaggacaccctgatgatcagccggacccccgaagtgacctgcgtggtggtggacgtgtcccacgaggaccctgaagtgaagttcaattggtacgtggacggcgtggaagtgcacaacgccaagaccaagcccagagaggaacagtacaacagcacctaccgggtggtgtccgtgctgaccgtgctgcaccaggactggctgaacggcaaagagtacaagtgcaaagtctccaacaaggccctggccgcccccatcgagaaaaccatcagcaaggccaagggccagccccgcgagccccaggtgtacacactgccccccagccgggacgagctgaccaagaaccaggtgtccctgacctgcctggtcaagggcttctaccccagcgatatcgccgtggaatgggagagcaacggccagcccgagaacaactacaagaccaccccccctgtgctggacagcgacggctcattcttcctgtacagcaagctgaccgtggacaagtcccggtggcagcagggcaacgtgttcagctgcagcgtgatgcacgaggccctgcacaaccactacacccagaagtccctgagcctgagccccggcaaa

SEQ ID NO: 1146 - protein, 217 aa, Artificial Sequence
  source: /note="Description of Artificial Sequence: Synthetic polypeptide"
APEAAGAPSVFLFPPKPKDTLMISRTPEVTCVVVDVSHEDPEVKFNWYVDGVEVHNAKTKPREEQYNSTYRVVSVLTVLHQDWLNGKEYKCKVSNKALPAPIEKTISKAKGQPREPQVYTLPPSRDELTKNQVSLTCLVKGFYPSDIAVEWESNGQPENNYKTTPPVLDSDGSFFLYSKLTVDKSRWQQGNVFSCSVMHEALHNHYTQKSLSLSPGK

SEQ ID NO: 1147 - DNA, 651 bp, Artificial Sequence
  source: /note="Description of Artificial Sequence: Synthetic polynucleotide"
gcccctgaagccgccggcgccccctccgtgttcctgttccccccaaagcccaaggacaccctgatgatcagccggacccccgaagtgacctgcgtggtggtggacgtgtcccacgaggaccctgaagtgaagttcaattggtacgtggacggcgtggaagtgcacaacgccaagaccaagcccagagaggaacagtacaacagcacctaccgggtggtgtccgtgctgaccgtgctgcaccaggactggctgaacggcaaagagtacaagtgcaaagtctccaacaaggccctgcctgcccccatcgagaaaaccatcagcaaggccaagggccagccccgcgagccccaggtgtacacactgccccccagccgggacgagctgaccaagaaccaggtgtccctgacctgcctggtcaagggcttctaccccagcgatatcgccgtggaatgggagagcaacggccagcccgagaacaactacaagaccaccccccctgtgctggacagcgacggctcattcttcctgtacagcaagctgaccgtggacaagtcccggtggcagcagggcaacgtgttcagctgcagcgtgatgcacgaggccctgcacaaccactacacccagaagtccctgagcctgagccccggcaaa

SEQ ID NO: 1148 - protein, 217 aa, Artificial Sequence
  source: /note="Description of Artificial Sequence: Synthetic polypeptide"
APEAAGGPSVFLFPPKPKDTLMISRTPEVTCVVVDVSHEDPEVKFNWYVDGVEVHNAKTKPREEQYNSTYRVVSVLTVLHQDWLNGKEYKCKVSNKALGAPIEKTISKAKGQPREPQVYTLPPSRDELTKNQVSLTCLVKGFYPSDIAVEWESNGQPENNYKTTPPVLDSDGSFFLYSKLTVDKSRWQQGNVFSCSVMHEALHNHYTQKSLSLSPGK

SEQ ID NO: 1149 - DNA, 651 bp, Artificial Sequence
  source: /note="Description of Artificial Sequence: Synthetic polynucleotide"
gcccctgaagccgccggcggaccctccgtgttcctgttccccccaaagcccaaggacaccctgatgatcagccggacccccgaagtgacctgcgtggtggtggacgtgtcccacgaggaccctgaagtgaagttcaattggtacgtggacggcgtggaagtgcacaacgccaagaccaagcccagagaggaacagtacaacagcacctaccgggtggtgtccgtgctgaccgtgctgcaccaggactggctgaacggcaaagagtacaagtgcaaagtctccaacaaggccctgggcgcccccatcgagaaaaccatcagcaaggccaagggccagccccgcgagccccaggtgtacacactgccccccagccgggacgagctgaccaagaaccaggtgtccctgacctgcctggtcaagggcttctaccccagcgatatcgccgtggaatgggagagcaacggccagcccgagaacaactacaagaccaccccccctgtgctggacagcgacggctcattcttcctgtacagcaagctgaccgtggacaagtcccggtggcagcagggcaacgtgttcagctgcagcgtgatgcacgaggccctgcacaaccactacacccagaagtccctgagcctgagccccggcaaa

SEQ ID NO: 1150 - protein, 217 aa, Artificial Sequence
  source: /note="Description of Artificial Sequence: Synthetic polypeptide"
APEAAGGPSVFLFPPKPKDTLMISRTPEVTCVVVDVKHEDPEVKFNWYVDGVEVHNAKTKPREEQYNSTYRVVSVLTVLHQDWLNGKEYKCKVSNKALAAPIEKTISKAKGQPREPQVYTLPPSRDELTKNQVSLTCLVKGFYPSDIAVEWESNGQPENNYKTTPPVLDSDGSFFLYSKLTVDKSRWQQGNVFSCSVMHEALHNHYTQKSLSLSPGK

SEQ ID NO: 1151 - DNA, 651 bp, Artificial Sequence
  source: /note="Description of Artificial Sequence: Synthetic polynucleotide"
gcccctgaagccgccggcggaccctccgtgttcctgttccccccaaagcccaaggacaccctgatgatcagccggacccccgaagtgacctgcgtggtggtggacgtgaagcacgaggaccctgaagtgaagttcaattggtacgtggacggcgtggaagtgcacaacgccaagaccaagcccagagaggaacagtacaacagcacctaccgggtggtgtccgtgctgaccgtgctgcaccaggactggctgaacggcaaagagtacaagtgcaaagtctccaacaaggccctggccgcccccatcgagaaaaccatcagcaaggccaagggccagccccgcgagccccaggtgtacacactgccccccagccgggacgagctgaccaagaaccaggtgtccctgacctgcctggtcaagggcttctaccccagcgatatcgccgtggaatgggagagcaacggccagcccgagaacaactacaagaccaccccccctgtgctggacagcgacggctcattcttcctgtacagcaagctgaccgtggacaagtcccggtggcagcagggcaacgtgttcagctgcagcgtgatgcacgaggccctgcacaaccactacacccagaagtccctgagcctgagccccggcaaa

SEQ ID NO: 1152 - protein, 217 aa, Artificial Sequence
  source: /note="Description of Artificial Sequence: Synthetic polypeptide"
APELLGGPSVFLFPPKPKDTLMISRTPEVTCVVVAVKHEDPEVKFNWYVDGVEVHNAKTKPREEQYNSTYRVVSVLTVLHQDWLNGKEYKCKVSNKALAAPIEKTISKAKGQPREPQVYTLPPSRDELTKNQVSLTCLVKGFYPSDIAVEWESNGQPENNYKTTPPVLDSDGSFFLYSKLTVDKSRWQQGNVFSCSVMHEALHNHYTQKSLSLSPGK

SEQ ID NO: 1153 - DNA, 651 bp, Artificial Sequence
  source: /note="Description of Artificial Sequence: Synthetic polynucleotide"
gcccctgaactgctgggcggaccctccgtgttcctgttccccccaaagcccaaggacaccctgatgatcagccggacccccgaagtgacctgcgtggtggtggccgtgaagcacgaggaccctgaagtgaagttcaattggtacgtggacggcgtggaagtgcacaacgccaagaccaagcccagagaggaacagtacaacagcacctaccgggtggtgtccgtgctgaccgtgctgcaccaggactggctgaacggcaaagagtacaagtgcaaagtctccaacaaggccctggccgcccccatcgagaaaaccatcagcaaggccaagggccagccccgcgagccccaggtgtacacactgccccccagccgggacgagctgaccaagaaccaggtgtccctgacctgcctggtcaagggcttctaccccagcgatatcgccgtggaatgggagagcaacggccagcccgagaacaactacaagaccaccccccctgtgctggacagcgacggctcattcttcctgtacagcaagctgaccgtggacaagtcccggtggcagcagggcaacgtgttcagctgcagcgtgatgcacgaggccctgcacaaccactacacccagaagtccctgagcctgagccccggcaaa

SEQ ID NO: 1154 - protein, 217 aa, Artificial Sequence
  source: /note="Description of Artificial Sequence: Synthetic polypeptide"
APELLGAPSVFLFPPKPKDTLMISRTPEVTCVVVAVSHEDPEVKFNWYVDGVEVHNAKTKPREEQYNSTYRVVSVLTVLHQDWLNGKEYKCKVSNKALAAPIEKTISKAKGQPREPQVYTLPPSRDELTKNQVSLTCLVKGFYPSDIAVEWESNGQPENNYKTTPPVLDSDGSFFLYSKLTVDKSRWQQGNVFSCSVMHEALHNHYTQKSLSLSPGK

SEQ ID NO: 1155 - DNA, 651 bp, Artificial Sequence
  source: /note="Description of Artificial Sequence: Synthetic polynucleotide"
gcccctgaactgctgggcgccccctccgtgttcctgttccccccaaagcccaaggacaccctgatgatcagccggacccccgaagtgacctgcgtggtggtggccgtgtcccacgaggaccctgaagtgaagttcaattggtacgtggacggcgtggaagtgcacaacgccaagaccaagcccagagaggaacagtacaacagcacctaccgggtggtgtccgtgctgaccgtgctgcaccaggactggctgaacggcaaagagtacaagtgcaaagtctccaacaaggccctggccgcccccatcgagaaaaccatcagcaaggccaagggccagccccgcgagccccaggtgtacacactgccccccagccgggacgagctgaccaagaaccaggtgtccctgacctgcctggtcaagggcttctaccccagcgatatcgccgtggaatgggagagcaacggccagcccgagaacaactacaagaccaccccccctgtgctggacagcgacggctcattcttcctgtacagcaagctgaccgtggacaagtcccggtggcagcagggcaacgtgttcagctgcagcgtgatgcacgaggccctgcacaaccactacacccagaagtccctgagcctgagccccggcaaa

SEQ ID NO: 1156 - protein, 217 aa, Artificial Sequence
  source: /note="Description of Artificial Sequence: Synthetic polypeptide"
APELLGAPSVFLFPPKPKDTLMISRTPEVTCVVVAVKHEDPEVKFNWYVDGVEVHNAKTKPREEQYNSTYRVVSVLTVLHQDWLNGKEYKCKVSNKALAAPIEKTISKAKGQPREPQVYTLPPSRDELTKNQVSLTCLVKGFYPSDIAVEWESNGQPENNYKTTPPVLDSDGSFFLYSKLTVDKSRWQQGNVFSCSVMHEALHNHYTQKSLSLSPGK

SEQ ID NO: 1157 - DNA, 651 bp, Artificial Sequence
  source: /note="Description of Artificial Sequence: Synthetic polynucleotide"
gcccctgaactgctgggcgccccctccgtgttcctgttccccccaaagcccaaggacaccctgatgatcagccggacccccgaagtgacctgcgtggtggtggccgtgaagcacgaggaccctgaagtgaagttcaattggtacgtggacggcgtggaagtgcacaacgccaagaccaagcccagagaggaacagtacaacagcacctaccgggtggtgtccgtgctgaccgtgctgcaccaggactggctgaacggcaaagagtacaagtgcaaagtctccaacaaggccctggccgcccccatcgagaaaaccatcagcaaggccaagggccagccccgcgagccccaggtgtacacactgccccccagccgggacgagctgaccaagaaccaggtgtccctgacctgcctggtcaagggcttctaccccagcgatatcgccgtggaatgggagagcaacggccagcccgagaacaactacaagaccaccccccctgtgctggacagcgacggctcattcttcctgtacagcaagctgaccgtggacaagtcccggtggcagcagggcaacgtgttcagctgcagcgtgatgcacgaggccctgcacaaccactacacccagaagtccctgagcctgagccccggcaaa

SEQ ID NO: 1158 - protein, 217 aa, Artificial Sequence
  source: /note="Description of Artificial Sequence: Synthetic polypeptide"
APELLGGPSVFLFPPKPKDTLMISRTPEVTCVVVAVSHEDPEVKFNWYVDGVEVHNAKTKPREEQYNSTYRVVSVLTVLHQDWLNGKEYKCKVSNKALAAPIEKTISKAKGQPREPQVYTLPPSRDELTKNQVSLTCLVKGFYPSDIAVEWESNGQPENNYKTTPPVLDSDGSFFLYSKLTVDKSRWQQGNVFSCSVMHEALHNHYTQKSLSLSPGK

SEQ ID NO: 1159 - DNA, 651 bp, Artificial Sequence
  source: /note="Description of Artificial Sequence: Synthetic polynucleotide"
gcccctgaactgctgggcggaccctccgtgttcctgttccccccaaagcccaaggacaccctgatgatcagccggacccccgaagtgacctgcgtggtggtggccgtgtcccacgaggaccctgaagtgaagttcaattggtacgtggacggcgtggaagtgcacaacgccaagaccaagcccagagaggaacagtacaacagcacctaccgggtggtgtccgtgctgaccgtgctgcaccaggactggctgaacggcaaagagtacaagtgcaaagtctccaacaaggccctggccgcccccatcgagaaaaccatcagcaaggccaagggccagccccgcgagccccaggtgtacacactgccccccagccgggacgagctgaccaagaaccaggtgtccctgacctgcctggtcaagggcttctaccccagcgatatcgccgtggaatgggagagcaacggccagcccgagaacaactacaagaccaccccccctgtgctggacagcgacggctcattcttcctgtacagcaagctgaccgtggacaagtcccggtggcagcagggcaacgtgttcagctgcagcgtgatgcacgaggccctgcacaaccactacacccagaagtccctgagcctgagccccggcaaa

SEQ ID NO: 1160 - protein, 217 aa, Artificial Sequence
  source: /note="Description of Artificial Sequence: Synthetic polypeptide"
APELLGGPSVFLFPPKPKDTLMISRTPEVTCVVVAVSHEDPEVKFNWYVDGVEVHNAKTKPREEQYASTYRVVSVLTVLHQDWLNGKEYKCKVSNKALAAPIEKTISKAKGQPREPQVYTLPPSRDELTKNQVSLTCLVKGFYPSDIAVEWESNGQPENNYKTTPPVLDSDGSFFLYSKLTVDKSRWQQGNVFSCSVMHEALHNHYTQKSLSLSPGK

SEQ ID NO: 1161 - DNA, 651 bp, Artificial Sequence
  source: /note="Description of Artificial Sequence: Synthetic polynucleotide"
gcccctgaactgctgggaggccctagcgtgttcctgttccccccaaagcccaaggacaccctgatgatcagccggacccccgaagtgacctgtgtggtggtggccgtgtctcacgaggaccctgaagtgaagtttaattggtacgtggacggcgtggaagtgcacaacgccaagaccaagcccagagaggaacagtacgccagcacctaccgggtggtgtccgtgctgacagtgctgcaccaggactggctgaacggcaaagagtacaagtgcaaggtgtccaacaaggccctggccgctcccatcgagaaaaccatcagcaaggccaagggccagccccgcgaaccccaggtgtacacactgccccctagcagggacgagctgaccaagaaccaggtgtccctgacctgcctcgtgaagggcttctacccctccgatatcgccgtggaatgggagagcaacggccagcccgagaacaactacaagaccaccccccctgtgctggactccgacggctcattcttcctgtacagcaagctgaccgtggacaagtcccggtggcagcagggcaacgtgttcagctgctccgtgatgcacgaggccctgcacaaccactacacccagaagtccctgagcctgagccccggcaaa

SEQ ID NO: 1162 - protein, 455 aa, Artificial Sequence
  source: /note="Description of Artificial Sequence: Synthetic polypeptide"
EVQLVESGGGLVQPGGSLKLSCAASGFTFNTYAMNWVRQASGKGLEWVGRIRSKYNNYATYYADSVKDRFTISRDDSKSTLYLQMNSLKTEDTAVYYCVRHGNFGNSYVSWFAYWGQGTLVTVSSASTKGPSVFPLAPSSKSTSGGTAALGCLVKDYFPEPVTVSWNSGALTSGVHTFPAVLQSSGLYSLSSVVTVPSSSLGTQTYICNVNHKPSNTKVDKRVEPKSCDKTHTCPPCPAPELLGGPSVFLFPPKPKDTLMISRTPEVTCVVVDVSHEDPEVKFNWYVDGVEVHNAKTKPREEQYNSTYRVVSVLTVLHQDWLNGKEYKCKVSNKALPAPIEKTISKAKGQPREPQVYTLPPSRDELTKNQVSLTCLVKGFYPSDIAVEWESNGQPENNYKTTPPVLDSDGSFFLYSKLTVDKSRWQQGNVFSCSVMHEALHNHYTQKSLSLSPGK

SEQ ID NO: 1163 - DNA, 1365 bp, Artificial Sequence
  source: /note="Description of Artificial Sequence: Synthetic polynucleotide"
gaagtgcagctggtggaatctggcggcggactggtgcagcctggcggatctctgaagctgagctgtgccgccagcggcttcaccttcaacacctacgccatgaactgggtgcgccaggcctctggcaagggcctggaatgggtgggacggatcagaagcaagtacaacaattacgccacctactacgccgacagcgtgaaggaccggttcaccatcagccgggacgacagcaagagcaccctgtacctgcagatgaacagcctgaaaaccgaggacaccgccgtgtactactgcgtgcggcacggcaacttcggcaacagctatgtgtcttggtttgcctactggggccagggcaccctcgtgacagtgagctcagctagcaccaagggccccagcgtgttccccctggcgcccagcagcaagagcaccagcggcggcacagccgccctgggctgcctggtgaaggactacttccccgagccagtgaccgtgtcctggaacagcggagccctgacctccggcgtgcacaccttccccgccgtgctgcagagcagcggcctgtacagcctgagcagcgtggtgaccgtgcccagcagcagcctgggcacccagacctacatctgcaacgtgaaccacaagcccagcaacaccaaggtggacaagagagtggagcccaagagctgcgacaagacccacacctgccccccctgtcctgcccctgaactgctgggcggaccctccgtgttcctgttccccccaaagcccaaggacaccctgatgatcagccggacccccgaagtgacctgcgtggtggtggacgtgtcccacgaggaccctgaagtgaagttcaattggtacgtggacggcgtggaagtgcacaacgccaagaccaagcccagagaggaacagtacaacagcacctaccgggtggtgtccgtgctgaccgtgctgcaccaggactggctgaacggcaaagagtacaagtgcaaagtctccaacaaggccctgcctgcccccatcgagaaaaccatcagcaaggccaagggccagccccgcgagccccaggtgtacacactgccccccagccgggacgagctgaccaagaaccaggtgtccctgacctgcctggtcaagggcttctaccccagcgatatcgccgtggaatgggagagcaacggccagcccgagaacaactacaagaccaccccccctgtgctggacagcgacggctcattcttcctgtacagcaagctgaccgtggacaagtcccggtggcagcagggcaacgtgttcagctgcagcgtgatgcacgaggccctgcacaaccactacacccagaagtccctgagcctgagccccggcaaa

SEQ ID NO: 1164 - protein, 455 aa, Artificial Sequence
  source: /note="Description of Artificial Sequence: Synthetic polypeptide"
EVQLVESGGGLVQPGGSLKLSCAASGFTFNTYAMNWVRQASGKGLEWVGRIRSKYNNYATYYADSVKDRFTISRDDSKSTLYLQMNSLKTEDTAVYYCVRHGNFGNSYVSWFAYWGQGTLVTVSSASTKGPSVFPLAPSSKSTSGGTAALGCLVKDYFPEPVTVSWNSGALTSGVHTFPAVLQSSGLYSLSSVVTVPSSSLGTQTYICNVNHKPSNTKVDKKVEPKSCDKTHTCPPCPAPELLGGPSVFLFPPKPKDTLMISRTPEVTCVVVDVSHEDPEVKFNWYVDGVEVHNAKTKPREEQYNSTYRVVSVLTVLHQDWLNGKEYKCKVSNKALPAPIEKTISKAKGQPREPQVYTLPPSRDELTKNQVSLTCLVKGFYPSDIAVEWESNGQPENNYKTTPPVLDSDGSFFLYSKLTVDKSRWQQGNVFSCSVMHEALHNHYTQKSLSLSPGK

SEQ ID NO: 1165 - DNA, 1365 bp, Artificial Sequence
  source: /note="Description of Artificial Sequence: Synthetic polynucleotide"
gaagtgcagctggtggaatctggcggcggactggtgcagcctggcggatctctgaagctgagctgtgccgccagcggcttcaccttcaacacctacgccatgaactgggtgcgccaggcctctggcaagggcctggaatgggtgggacggatcagaagcaagtacaacaattacgccacctactacgccgacagcgtgaaggaccggttcaccatcagccgggacgacagcaagagcaccctgtacctgcagatgaacagcctgaaaaccgaggacaccgccgtgtactactgcgtgcggcacggcaacttcggcaacagctatgtgtcttggtttgcctactggggccagggcaccctcgtgacagtgagctcagctagcaccaagggccccagcgtgttccccctggcgcccagcagcaagagcaccagcggcggcacagccgccctgggctgcctggtgaaggactacttccccgagccagtgaccgtgtcctggaacagcggagccctgacctccggcgtgcacaccttccccgccgtgctgcagagcagcggcctgtacagcctgagcagcgtggtgaccgtgcccagcagcagcctgggcacccagacctacatctgcaacgtgaaccacaagcccagcaacaccaaggtggacaagaaggtggagcccaagagctgcgacaagacccacacctgccccccctgtcctgcccctgaactgctgggcggaccctccgtgttcctgttccccccaaagcccaaggacaccctgatgatcagccggacccccgaagtgacctgcgtggtggtggacgtgtcccacgaggaccctgaagtgaagttcaattggtacgtggacggcgtggaagtgcacaacgccaagaccaagcccagagaggaacagtacaacagcacctaccgggtggtgtccgtgctgaccgtgctgcaccaggactggctgaacggcaaagagtacaagtgcaaagtctccaacaaggccctgcctgcccccatcgagaaaaccatcagcaaggccaagggccagccccgcgagccccaggtgtacacactgccccccagccgggacgagctgaccaagaaccaggtgtccctgacctgcctggtcaagggcttctaccccagcgatatcgccgtggaatgggagagcaacggccagcccgagaacaactacaagaccaccccccctgtgctggacagcgacggctcattcttcctgtacagcaagctgaccgtggacaagtcccggtggcagcagggcaacgtgttcagctgcagcgtgatgcacgaggccctgcacaaccactacacccagaagtccctgagcctgagccccggcaaa

SEQ ID NO: 1166 - protein, 215 aa, Artificial Sequence
  source: /note="Description of Artificial Sequence: Synthetic polypeptide"
QAVVTQEPSLTVSPGGTVTLTCRSSTGAVTTSNYANWVQQKPGQAPRGLIGGTNKRAPWTPARFSGSLLGDKAALTLSGAQPEDEAEYFCALWYSNLWVFGGGTKLTVLGQPKAAPSVTLFPPSSEELQANKATLVCLISDFYPGAVTVAWKADSSPVKAGVETTTPSKQSNNKYAASSYLSLTPEQWKSHRSYSCQVTHEGSTVEKTVAPTECS

SEQ ID NO: 1167 - DNA, 645 bp, Artificial Sequence
  source: /note="Description of Artificial Sequence: Synthetic polynucleotide"
caggctgtcgtgacccaggaacctagcctgaccgtgtctcctggcggaaccgtgaccctgacctgtagatctagcacaggcgccgtgaccaccagcaactacgccaattgggtgcagcagaagcccggccaggctcctagaggactgatcggcggcaccaacaagagagccccttggacccctgccagattcagcggctctctgctgggagataaggccgccctgacactgtctggcgcccagcctgaggatgaggccgagtacttttgcgccctgtggtacagcaacctgtgggtgttcggcggaggcaccaagctgaccgtgctgggccagcctaaggccgctccctccgtgaccctgttcccccccagctccgaggaactgcaggccaacaaggccaccctggtgtgcctgatcagcgacttctaccctggcgccgtgaccgtggcctggaaggccgacagcagccccgtgaaggccggcgtggagacaaccacccccagcaagcagagcaacaacaagtacgccgccagcagctacctgagcctgacccccgagcagtggaagagccacagaagctacagctgccaggtcacccacgagggcagcaccgtggagaaaaccgtggcccccaccgagtgcagc

SEQ ID NO: 1168 - DNA, 978 bp, Artificial Sequence
  source: /note="Description of Artificial Sequence: Synthetic polynucleotide"
tctcagcagatctatggcgtggtgtacggcaacgtgaccttccacgtgccaagcaacgtgcccctgaaagaggtgctctggaagaaacagaaagacaaggtggccgagctggaaaacagcgagttcagagccttcagcagcttcaagaaccgggtgtacctggataccgtgtccggcagcctgaccatctacaatctgaccagcagcgacgaggacgagtacgagatggaaagccccaacatcaccgacaccatgaagttctttctgtacgtgctggaaagcggcggaggcggctctgataagacacacacatgtcctccatgtcctgctccagaagcagctggcggaccctctgttttcctgtttccacctaagccaaaggacaccctgatgatcagcagaacccctgaagtgacctgcgtggtggtggatgtgtctcacgaggaccccgaagtgaagttcaattggtacgtggacggcgtggaagtgcacaacgccaagaccaagcctagagaggaacagtacaacagcacctacagagtggtgtccgtgctgaccgtgctgcaccaggattggctgaacggcaaagagtacaagtgcaaggtgtccaacaaggccctgcctgctcctatcgagaaaaccatcagcaaggccaagggccagccaagagaaccccaggtttacaccctgcctccatgccgggaagagatgaccaagaatcaggtgtccctgtggtgcctggtcaagggcttctacccttccgatatcgccgtggaatgggagagcaatggccagcctgagaacaactacaagaccacacctcctgtgctggacagcgacggctcattcttcctgtacagcaagctgacagtggacaagagcagatggcagcagggcaacgtgttcagctgttctgtgatgcacgaggccctgcacaaccactacacccagaagtctctgtctctgagccccggcaaa
